(19) United States
(12) Patent Application Publication
(10) Pub. No.: US 2005/0181375 A1
(43) Pub. Date: Aug. 18, 2005

(54) Novel methods of diagnosis of metastatic cancer, compositions and methods of screening for modulators of metastatic cancer

(76) Inventors: Natasha Aziz, Palo Alto, CA (US); Albert Zlotnik, San Diego, CA (US)

Correspondence Address: HOWREY SIMON ARNOLD & WHITE, LLP;C/O M.P. DROSOS, DIRECTOR OF IP ADMINISTRATION, 2941 FAIRVIEW PK, BOX 7, FALLS CHURCH, VA, 22042, US

(21) Appl. No.: 10/756,149

(22) Filed: Jan. 12, 2004

Related U.S. Application Data
(60) Provisional application No. 60/439,058, filed on Jan. 10, 2003.

(51) Int. Cl. C12Q 1/68; G01N 33/574; C07K 16/40; C07H 21/04; C12N 9/00

(52) U.S. Cl. 435/6; 435/7.23; 536/23.2; 435/183; 530/388.8

(57) ABSTRACT

Described herein are methods and compositions that can be used for diagnosis and treatment of metastatic cancer. Also described herein are methods that can be used to identify modulators of metastatic cancer.

### RELATED APPLICATIONS

[0001] This application claims priority from U.S. Provisional Application No. 60/439,058 filed Jan. 10, 2003, which is hereby incorporated by reference in its entirety.

### SEQUENCE LISTING SUBMITTED ON CD

[0002] This application includes a sequence listing on a compact disc submitted with this application. The compact disc includes a 20.724 megabyte ASCII formatted file, created Jan. 9, 2004, entitled, “0188SEQL.txt”. This file lists 5818 sequences. In accordance with 37 C.F.R. § 1.52(e)(5), the sequence listing on the compact disc is hereby incorporated by reference.

### FIELD OF THE INVENTION

[0003] The invention relates to the identification of nucleic acids and proteins identified by expression profiles, and nucleic acids, products, and antibodies thereto that are involved in metastatic cancer; and to the use of such expression profiles and compositions in diagnosis and therapy of metastatic cancer. The invention further relates to methods for identifying and using agents and/or targets that inhibit metastatic cancer.

### BACKGROUND OF THE INVENTION

[0004] Metastatic disease can be viewed as two simultaneously occurring diseases; a disease at a primary site, and a related disease at a secondary location distant from the primary site. Each disease may have different mortality rates, for example in cases of metastatic breast or lung cancer to the brain. In such cases untreated brain metastases are rapidly fatal, while primary breast or lung cancer may actually be cureable.

[0005] Unfortunately, many cancers metastasize. While there are many variables that determine where metastatic tumors grow, often, the metastatic location is the nearest cluster of small blood vessels found by the circulating cancer cells. Thus, lung cancer commonly metastasizes to the brain; colon cancer commonly metastasizes to the liver. Alternatively, the cancer may have a preferred site of metastasis. For example, the brain is a preferred site for melanoma and small cell lung cancer. A metastasis of a metastasis may develop as well. For example, a colon cancer may metastasize to the liver, which in turn may metastasize to the lung, which may in turn metastasize to the brain.

[0006] Without wishing to be bound by theory, it is believed that metastasis occurs when cancer cells from the primary site break away and enter the body's circulatory system through the blood stream, lymph system, or spinal fluid and travel to distant locations. Although cancer metastasis may occur in nearly any organ, brain metastases are one of the most common sites of systemic spread from solid tumors, with an annual incidence of over 100,000 cases. Indeed, metastatic brain tumors occur in about one-fourth of all cancers that metastasize, and primary and metastatic brain tumors kill 15,000 people each year. The most common primary tumors that metastasize to the brain are lung, breast, melanoma, and colon, however almost any cancer has this potential.

[0007] Although almost 1 in 4 patients with cancer will develop tumors that spread to the central nervous system (CNS) cancer can metastasize to almost any organ.

[0008] Classification of metastatic tumors depends on the tissue type from which they are derived. Unfortunately, it is often difficult or impossible to determine the location of the primary cancer and this can unnecessarily complicate diagnosis and treatment of the metastatic cancer. In addition early diagnosis of metastatic cancer can greatly improve the prognostic outlook for a cancer patient. Often metastatic burden, rather than the primary cancer, is what ultimately kills a patient.

[0009] Thus need exists for an efficient and effective method for the identification of metastatic tumor origins, as well as methods for diagnosis, prognosis and treatment of metastatic cancer. The development of successful therapeutic modalities is however, unlikely to follow the conventional approaches of surgery, radiation and cytotoxic chemotherapy. Rather, the best hope lies in the rapidly expanding field of molecular medicine.

[0010] Accordingly, provided herein are molecular targets for therapeutic intervention in metastatic breast and lung cancer. Additionally, provided herein are methods that can be used in diagnosis and prognosis of metastatic breast and lung cancer. Further provided are methods that can be used to screen candidate bioactive agents for the ability to modulate metastatic cancer including metastatic brain tumors.

### SUMMARY OF THE INVENTION

[0011] The present invention therefore provides nucleotide sequences of genes that are up- and down-regulated in metastatic breast or metastatic lung cancer cells. Such genes and the proteins they encode are useful for diagnostic and prognostic purposes, and also as targets for screening for therapeutic compounds that modulate metastatic breast or lung cancer, such as antibodies. The methods of detecting nucleic acids of the invention or their encoded proteins can be used for a number of purposes. Examples include, early detection of breast or lung cancers, monitoring and early detection of relapse following treatment of breast or lung cancers including early detection of metastatic cancer, monitoring response to therapy of breast or lung cancers, determining prognosis of breast or lung cancers, directing therapy of breast or lung cancers, selecting patients for postoperative chemotherapy or radiation therapy, selecting therapy, determining tumor prognosis and the likelihood that a given cancer will metastasize or has metastasized, treatment, or response to treatment, early detection of precancerous conditions and early detection of metastasis. Other aspects of the invention will become apparent to the skilled artisan by the following description of the invention.

[0012] In one aspect, the present invention provides a method of detecting a metastatic breast or lung cancer-associated transcript in a cell from a patient, the method comprising contacting a biological sample from the patient with a polynucleotide that selectively hybridizes to a sequence at least 80% identical to a sequence as shown in Tables 1A-12C.

[0013] In one embodiment, the polynucleotide selectively hybridizes to a sequence at least 95% identical to a sequence as shown in Tables 1A-12C. In another embodiment, the polynucleotide comprises a sequence as shown in Tables 1A-12C.

[0014] In one embodiment, the biological sample is a tissue sample. In another embodiment, the biological sample comprises isolated nucleic acids, e.g., mRNA.

[0015] In one embodiment, the polynucleotide is labeled, e.g., with a fluorescent label.

[0016] In one embodiment, the polynucleotide is immobilized on a solid surface.

[0017] In one embodiment, the patient is undergoing a therapeutic regimen to treat metastatic breast or lung cancer. In another embodiment, the metastatic breast or lung cancer has metastasized to the brain.

[0018] In one embodiment, the patient is a human.

[0019] In one embodiment, the method further comprises the step of amplifying nucleic acids before the step of contacting the biological sample with the polynucleotide.

[0020] In another aspect, the present invention provides methods of detecting polypeptide encoded by a metastatic breast or lung cancer-associated transcript in a cell from a patient, the method comprising contacting a biological sample from the patient with an antibody that specifically binds a polypeptide encoded by a sequence at least 80% identical to a sequence as shown in Tables 1A-12C.

[0021] In another aspect, the present invention provides a method of monitoring the efficacy of a therapeutic treatment of metastatic breast or lung cancer, the method comprising the steps of: (i) providing a biological sample from a patient undergoing the therapeutic treatment; and (ii) determining the level of a metastatic breast or lung cancer-associated transcript in the biological sample by contacting the biological sample with a polynucleotide that selectively hybridizes to a sequence at least 80% identical to a sequence as shown in Tables 1A-12C., thereby monitoring the efficacy of the therapy.

[0022] In one embodiment, the method further comprises the step of: (iii) comparing the level of the metastatic breast or lung cancer-associated transcript to a level of the metastatic breast or lung cancer-associated transcript in a biological sample from the patient prior to, or earlier in, the therapeutic treatment.

[0023] In another aspect, the present invention provides a method of monitoring the efficacy of a therapeutic treatment of metastatic breast or lung cancer, the method comprising the steps of: (i) providing a biological sample from a patient undergoing the therapeutic treatment; and (ii) determining the level of a metastatic breast or lung cancer-associated antibody in the biological sample by contacting the biological sample with a polypeptide encoded by a polynucleotide that selectively hybridizes to a sequence at least 80% identical to a sequence as shown in Tables 1A-12C, wherein the polypeptide specifically binds to the metastatic breast or lung cancer-associated antibody, thereby monitoring the efficacy of the therapy.

[0024] In one embodiment, the method further comprises the step of: (iii) comparing the level of the metastatic breast or lung cancer-associated antibody to a level of the metastatic breast or lung cancer-associated antibody in a biological sample from the patient prior to, or earlier in, the therapeutic treatment.

[0025] In another aspect, the present invention provides a method of monitoring the efficacy of a therapeutic treatment of metastatic breast or lung cancer, the method comprising the steps of: (i) providing a biological sample from a patient undergoing the therapeutic treatment; and (ii) determining the level of a metastatic breast or lung cancer-associated polypeptide in the biological sample by contacting the biological sample with an antibody, wherein the antibody specifically binds to a polypeptide encoded by a polynucleotide that selectively hybridizes to a sequence at least 80% identical to a sequence as shown in Tables 1A-12C, thereby monitoring the efficacy of the therapy.

[0026] In one embodiment, the method further comprises the step of: (iii) comparing the level of the metastatic breast or lung cancer-associated polypeptide to a level of the metastatic breast or lung cancer-associated polypeptide in a biological sample from the patient prior to, or earlier in, the therapeutic treatment.

[0027] In one aspect, the present invention provides an isolated nucleic acid molecule consisting of a polynucleotide sequence as shown in Tables 1A-12C.

[0028] In one embodiment, an expression vector or cell comprises the isolated nucleic acid.

[0029] In one aspect, the present invention provides an isolated polypeptide which is encoded by a nucleic acid molecule having polynucleotide sequence as shown in Tables 1A-12C.

[0030] In another aspect, the present invention provides an antibody that specifically binds to an isolated polypeptide which is encoded by a nucleic acid molecule having polynucleotide sequence as shown in Tables 1A-12C.

[0031] In one embodiment, the antibody is conjugated to an effector component, e.g., a fluorescent label, a radioisotope or a cytotoxic chemical.

[0032] In one embodiment, the antibody is an antibody fragment. In another embodiment, the antibody is humanized.

[0033] In one aspect, the present invention provides a method of detecting a metastatic breast or lung cancer cell in a biological sample from a patient, the method comprising contacting the biological sample with an antibody as described herein.

[0034] In another aspect, the present invention provides a method of detecting antibodies specific to metastatic breast or lung cancer in a patient, the method comprising contacting a biological sample from the patient with a polypeptide encoded by a nucleic acid comprises a sequence from Tables 1A-12C.

[0035] In another aspect, the present invention provides a method for identifying a compound that modulates a metastatic breast or lung cancer-associated polypeptide, the method comprising the steps of: (i) contacting the compound with a metastatic breast or lung cancer-associated polypeptide, the polypeptide encoded by a polynucleotide that selectively hybridizes to a sequence at least 80% identical to a sequence as shown in Tables 1A-12C; and (ii) determining the functional effect of the compound upon the polypeptide.

[0036] In one embodiment, the functional effect is a physical effect, an enzymatic effect, or a chemical effect.

[0037] In one embodiment, the polypeptide is expressed in a eukaryotic host cell or cell membrane. In another embodiment, the polypeptide is recombinant.

[0038] In one embodiment, the functional effect is determined by measuring ligand binding to the polypeptide.

[0039] In another aspect, the present invention provides a method of inhibiting proliferation of a metastatic breast or lung cancer-associated cell to treat breast or lung cancer in a patient, the method comprising the step of administering to the subject a therapeutically effective amount of a compound identified as described herein.

[0040] In one embodiment, the compound is an antibody.

[0041] In another aspect, the present invention provides a drug screening assay comprising the steps of: (i) administering a test compound to a mammal having metastatic breast or lung cancer or a cell isolated therefrom; (ii) comparing the level of gene expression of a polynucleotide that selectively hybridizes to a sequence at least 80% identical to a sequence as shown in Tables 1A-12C in a treated cell or mammal with the level of gene expression of the polynucleotide in a control cell or mammal, wherein a test compound that modulates the level of expression of the polynucleotide is a candidate for the treatment of metastatic breast or lung cancer.

[0042] In one embodiment, the control is a mammal with metastatic breast or lung cancer or a cell therefrom that has not been treated with the test compound. In another embodiment, the control is a normal cell or mammal.

[0043] In another aspect, the present invention provides a method for treating a mammal having metastatic breast or lung cancer comprising administering a compound identified by the assay described herein.

[0044] In another aspect, the present invention provides a pharmaceutical composition for treating a mammal having meta static breast or lung cancer, the composition comprising a compound identified by the assay described herein and a physiologically acceptable excipient.

### DETAILED DESCRIPTION OF THE INVENTION

[0045] In accordance with the objects outlined above, the present invention provides novel methods for diagnosis and treatment of metastatic breast or metastatic lung cancer. The invention is useful for the treatment of metastatic breast and metastatic lung cancer when the cancer is metastasized to the brain, as well as when the cancer is metastasized to other organs and tissues. The invention also provides methods of screening for compositions which modulate metastatic breast cancer or metastatic lung cancer.

[0046] Primary tumors are classified by the type of tissue from which they arise, metastatic tumors are classified by the tissue type from which the cancer cells are derived. Almost any cancer can metastasize. The metastases may occur to any site, however some cancers preferentially metastasize to particular organs. For example lung, breast, head & neck, cervical, and bladder tumors frequently metastasize to particular organs. Specifically, lung cancer metastatisizes to: brain, bone, liver, adrenal glands, lung, pleura, subcutaneous tissue, kidney, lymph nodes, cerebrospinal fluid, pancreas, bone marrow. Breast cancer metastatisizes to: lymph nodes, breast, abdominal viscera, lungs, bones, liver, adrenal glands, brain, meninges, pleura, cerebrospinal fluid. Head and neck cancer metastatisizes to: lung, esophagus, upper aerodigestive tract, lymph nodes, oral cavity, nasal cavity. Cervical cancer metastatisizes to: vagina, paracervical spaces, bladder, rectum, pelvic wall, lymph nodes. Bladder cancer metastatisizes to: prostate, uterus, vagina, bowel, pelvic wall, lymph nodes, and perivesical fat.

[0047] Brain metastases are a particular concern because of the deadly nature of brain tumors in general. Because the brain is generally unforgiving in its response to both the tumor and therapy, prognosis in cases metastatic brain tumors is especially poor. This is the case whether or not the primary cancer is treatable or even cured.

[0048] Whether or not cancer cells metastasize to the brain or other parts of the body depends on many factors including the type of cancer, stage of cancer, and original location of the cancer. Treatment for secondary (metastatic) tumors depends on where the cancer started and the extent of the spread as well as other factors, including the patient's age, general health, and response to previous treatment.

[0049] Knowing the origin of metastatic cancer can greatly improve the probable outcome of treatment for individuals with metastatic disease. Indeed, the earlier metastatic cancer can be detected, the better is the prognosis for the individual since it is often metastatic burden that kills a patient. Because metastatic burden increases with time, early detection is essential for successful treatment.

[0050] Thus, in accordance with the objectives of the invention, Tables 1A-12C provide UniGene cluster identification numbers for the nucleotide sequence of genes that exhibit increased or decreased expression in metastasizing breast and lung cancer samples. Tables 1A-12C also provide an exemplar accession number that provides a nucleotide sequence that is part of the UniGene cluster.

[0051] Table 1A shows about 461 genes upregulated in breast metastases to the brain relative to normal breast tissues. Table 2A shows about 445 genes upregulated in breast metastases to the brain relative to normal body tissues. Table 3A shows about 216 genes upregulated in breast metastases to the brain relative to primary breast tumors. Table 4A shows about 350 genes downregulated in breast metastases to the brain relative to primary breast tumors. Table 5A shows about 489 genes downregulated in breast metastases to the brain relative to normal breast tissue. Table 6A shows about 1251 genes upregulated in lung metastases to the brain relative to normal lung tissues. Table 7A shows about 381 genes upregulated in lung metastases to the brain relative to normal body tissues. Table 8A shows about 330 genes upregulated in lung metastases to the brain relative to primary lung tumors. Table 9A shows about 252 genes downregulated in lung metastases to the brain relative to primary lung tumors. Table 10A shows about 289 genes downregulated in lung metastases to the brain relative to normal lung tissue. Table 11A shows about 1198 genes upregulated in breast and lung metastases to the brain relative to normal body tissues. Table 12A shows about 2867 genes upregulated in breast and lung metastases to the brain relative to normal breast and lung tissues.

[0052] Although the Tables and analysis herein is derived primarily from metastases to the brain, it is expected that markers identified from these samples should also be expressed in metastasis to other organs, particularly metastasis originating from tumors in the lung, breast, head and neck, cervix, and bladder. Indeed, the tumor-specific genes expressed in lung tumors are often also expressed in head and neck, cervical, and bladder tumors Therefore, the genes identified in metastases of primary lung tumors may also be expressed in primary tumors and metastases arising from primary tumors of the nasal cavity, paranasal sinuses, nasopharynx, oral cavity, oral pharynx, lip, larynx, hypopharynx, salivary glands, paragangliomas, esophagus, cervix, vagina, vulva, or bladder. Thus, the identified metastatic markers should be useful in diagnosis, prognosis, or therapy of metastases from these cancers.

[0053] Furthermore, one of skill will recognize that although the sequences identified in Tables 1A-12C exhibited increased or decreased expression in metastasizing breast or lung cancer samples, the sequences of the invention, and their encoded proteins, can also be used to diagnose, treat or prevent cancers in patients with non-metastatic breast cancers or non-metastatic lung cancers. Alteration of gene expression for a gene in Tables 1A-12C may be more likely or less likely to indicate that the subject will progress to metastatic disease. The sequences can also be used to diagnose, treat or prevent precancerous or benign conditions.

[0054] Alteration of gene expression for a gene in Tables 1 A-12C may or may not indicate that the subject is more likely to progress to cancer or to metastatic disease. Thus, although the specification focuses primarily on metastasizing breast or lung cancer, the methods described below can also be applied to non-metastasizing breast or lung cancers and precancerous or benign conditions as well.

### Definitions

[0055] The term “metastatic breast cancer protein” or “metastatic breast cancer polynucleotide” or “metastatic breast cancer-associated transcript” refers to nucleic acid and polypeptide polymorphic variants, alleles, mutants, and interspecies homologs that: (1) have a nucleotide sequence that has greater than about 60% nucleotide sequence identity, 65%, 70%, 75%, 80%, 85%, 90%, preferably 91%, 92%, 93%, 94%, 95%, 96%, 97%, 98% or 99% or greater nucleotide sequence identity, preferably over a region of over a region of at least about 25, 50, 100, 200, 500, 1000, or more nucleotides, to a nucleotide sequence of or associated with a UniGene cluster of Tables 1-5, 11, and 12; (2) bind to antibodies, e.g., polyclonal antibodies, raised against an immunogen comprising an amino acid sequence encoded by a nucleotide sequence of or associated with a UniGene cluster of Tables 1-5, 11, and 12, and conservatively modified variants thereof; (3) specifically hybridize under stringent hybridization conditions to a nucleic acid sequence, or the complement thereof of Tables 1-5, 11, and 12 and conservatively modified variants thereof or (4) have an amino acid sequence that has greater than about 60% amino acid sequence identity, 65%, 70%, 75%, 80%, 85%, 90%, preferably 91%, 92%, 93%, 94%, 95%, 96%, 97%, 98% or 99% amino sequence identity, preferably over a region of over a region of at least about 25, 50, 100, 200, 500, 1000, or more amino acid, to an amino acid sequence encoded by a nucleotide sequence of or associated with a UniGene cluster of Tables 1-5, 11, and 12. A polynucleotide or polypeptide sequence is typically from a mammal including, but not limited to, primate, e.g., human; rodent, e.g., rat, mouse, hamster; cow, pig, horse, sheep, or other mammal. A “metastatic breast cancer polypeptide” and a “metastatic breast cancer polynucleotide,” include both naturally occurring or recombinant.

[0056] The term “metastatic lung cancer protein” or “metastatic lung cancer polynucleotide” or “metastatic lung cancer-associated transcript” refers to nucleic acid and polypeptide polymorphic variants, alleles, mutants, and interspecies homologs that: (1) have a nucleotide sequence that has greater than about 60% nucleotide sequence identity, 65%, 70%, 75%, 80%, 85%, 90%, preferably 91%, 92%, 93%, 94%, 95%, 96%, 97%, 98% or 99% or greater nucleotide sequence identity, preferably over a region of over a region of at least about 25, 50, 100, 200, 500, 1000, or more nucleotides, to a nucleotide sequence of or associated with a UniGene cluster of Tables 6A-12C; (2) bind to antibodies, e.g., polyclonal antibodies, raised against an immunogen comprising an amino acid sequence encoded by a nucleotide sequence of or associated with a UniGene cluster of Tables 6A-12C, and conservatively modified variants thereof; (3) specifically hybridize under stringent hybridization conditions to a nucleic acid sequence, or the complement thereof of Tables 6A-12C and conservatively modified variants thereof or (4) have an amino acid sequence that has greater than about 60% amino acid sequence identity, 65%, 70%, 75%, 80%, 85%, 90%, preferably 91%, 92%, 93%, 94%, 95%, 96%, 97%, 98% or 99% or greater amino sequence identity, preferably over a region of over a region of at least about 25, 50, 100, 200, 500, 1000, or more amino acid, to an amino acid sequence encoded by a nucleotide sequence of or associated with a UniGene cluster of Tables 6A-12C. A polynucleotide or polypeptide sequence is typically from a mammal including, but not limited to, primate, e.g., human; rodent, e.g., rat, mouse, hamster; cow, pig, horse, sheep, or other mammal. A “metastatic lung cancer polypeptide” and a “metastatic lung cancer polynucleotide,” include both naturally occurring or recombinant.

[0057] The term “metastasis” refers to the process by which a disease shifts from from one part of the body to another. This process may include the spreading of neoplasms from the site of a primary tumor to distant parts of the body.

[0058] The term “metastatic brain tumor” refers to a tumor of the brain and/or its associated bone, blood vessels, meninges etc that has developed as a result of the metastasis of cancer from a primary site to the brain.

[0059] The term “secondary brain tumor” refers to a metastatic brain tumor as defined above.

[0060] The term “metastatic breast cancer” refers to any cancer in any part of the body which has its origins in breast cancer tissue. Metastatic breast cancer includes, but is not limited to “metastatic brain tumors” that have their origin in a primary breast cancer, and pre- metastatic primary tumor cells in the process of developing a metastatic phenotype.

[0061] The term “metastatic lung cancer” refers to any cancer in any part of the body which has its origins in lung cancer tissue. Metastatic lung cancer includes, but is not limited to “metastatic brain tumors” that have their origin in a primary lung cancer, and pre-metastatic primary tumor cells in the process of developing a metastatic phenotype.

[0062] A “full length” metastatic breast or lung cancer protein or nucleic acid refers to a metastatic breast or lung cancer polypeptide or polynucleotide sequence, or a variant thereof, that contains all of the elements normally contained in one or more naturally occurring, wild type metastatic breast or lung cancer polynucleotide or polypeptide sequences. The “full length” may be prior to, or after, various stages of post-translation processing or splicing, including alternative splicing.

[0063] “Biological sample” as used herein is a sample of biological tissue or fluid that contains nucleic acids or polypeptides, e.g., of a metastatic breast or lung cancer protein, polynucleotide or transcript. Such samples include, but are not limited to, tissue isolated from primates, e.g., humans, or rodents, e.g., mice, and rats. Biological samples may also include sections of tissues such as biopsy and autopsy samples, frozen sections taken for histologic purposes, blood, plasma, serum, sputum, stool, tears, mucus, hair, skin, etc. Biological samples also include explants and primary and/or transformed cell cultures derived from patient tissues. A biological sample is typically obtained from a eukaryotic organism, most preferably a mammal such as a primate, e.g., chimpanzee or human; cow; dog; cat; a rodent, e.g., guinea pig, rat, mouse; rabbit; or other mammal; or a bird; reptile; fish.

[0064] “Providing a biological sample” means to obtain a biological sample for use in methods described in this invention. Most often, this will be done by removing a sample of cells from an animal, but can also be accomplished by using previously isolated cells (e.g., isolated by another person, at another time, and/or for another purpose), or by performing the methods of the invention in vivo. Archival tissues, having treatment or outcome history, will be particularly useful.

[0065] The terms “identical” or percent “identity,” in the context of two or more nucleic acids or polypeptide sequences, refer to two or more sequences or subsequences that are the same or have a specified percentage of amino acid residues or nucleotides that are the same (i.e., about 60% identity, preferably 70%, 75%, 80%, 85%, 90%, 91%, 92%, 93%, 94%, 96%, 97%, 98%, 99%, or higher identity over a specified region, when compared and aligned for maximum correspondence over a comparison window or designated region) as measured using a BLAST or BLAST 2.0 sequence comparison algorithms with default parameters described below, or by manual alignment and visual inspection. Such sequences are then said to be “substantially identical.” This definition also refers to, or may be applied to, the compliment of a test sequence. The definition also includes sequences that have deletions and/or additions, as well as those that have substitutions, as well as naturally occurring, e.g., polymorphic or allelic variants, and man-made variants. As described below, the preferred algorithms can account for gaps and the like. Preferably, identity exists over a region that is at least about 25 amino acids or nucleotides in length, or more preferably over a region that is 50-100 amino acids or nucleotides in length.

[0066] For sequence comparison, typically one sequence acts as a reference sequence, to which test sequences are compared. When using a sequence comparison algorithm, test and reference sequences are entered into a computer, subsequence coordinates are designated, if necessary, and sequence algorithm program parameters are designated. Preferably, default program parameters can be used, or alternative parameters can be designated. The sequence comparison algorithm then calculates the percent sequence identities for the test sequences relative to the reference sequence, based on the program parameters.

[0067] A “comparison window”, as used herein, includes reference to a segment of one of the number of contiguous positions selected from the group consisting typically of from 20 to 600, usually about 50 to about 200, more usually about 100 to about 150 in which a sequence may be compared to a reference sequence of the same number of contiguous positions after the two sequences are optimally aligned. Methods of alignment of sequences for comparison are well-known in the art. Optimal alignment of sequences for comparison can be conducted, e.g., by the local homology algorithm of Smith & Waterman, Adv. Appl. Math. 2:482 (1981), by the homology alignment algorithm of Needleman & Wunsch, J. Mol. Biol. 48:443 (1970), by the search for similarity method of Pearson & Lipman, Proc. Nat'l. Acad. Sci. USA 85:2444 (1988), by computerized implementations of these algorithms (GAP, BESTFIT, FASTA, and TFASTA in the Wisconsin Genetics Software Package, Genetics Computer Group, 575 Science Dr., Madison, Wis.), or by manual alignment and visual inspection (see, e.g., Current Protocols in Molecular Biology (Ausubel et al., eds. 1995 supplement)).

[0068] Preferred examples of algorithms that are suitable for determining percent sequence identity and sequence similarity include the BLAST and BLAST 2.0 algorithms, which are described in Altschul et al., Nuc. Acids Res. 25:3389-3402 (1977) and Altschul et al., J. Mol. Biol. 215:403-410 (1990). BLAST and BLAST 2.0 are used, with the parameters described herein, to determine percent sequence identity for the nucleic acids and proteins of the invention. Software for performing BLAST analyses is publicly available through the National Center for Biotechnology Information. This algorithm involves first identifying high scoring sequence pairs (HSPs) by identifying short words of length W in the query sequence, which either match or satisfy some positive-valued threshold score T when aligned with a word of the same length in a database sequence. T is referred to as the neighborhood word score threshold (Altschul et al., supra). These initial neighborhood word hits act as seeds for initiating searches to find longer HSPs containing them. The word hits are extended in both directions along each sequence for as far as the cumulative alignment score can be increased. Cumulative scores are calculated using, e.g., for nucleotide sequences, the parameters M (reward score for a pair of matching residues; always>0) and N (penalty score for mismatching residues; always <0). For amino acid sequences, a scoring matrix is used to calculate the cumulative score. Extension of the word hits in each direction are halted when: the cumulative alignment score falls off by the quantity X from its maximum achieved value; the cumulative score goes to zero or below, due to the accumulation of one or more negative-scoring residue alignments; or the end of either sequence is reached. The BLAST algorithm parameters W, T, and X determine the sensitivity and speed of the alignment. The BLASTN program (for nucleotide sequences) uses as defaults a wordlength (W) of 11, an expectation (E) of 10, M=5, N=−4 and a comparison of both strands. For amino acid sequences, the BLASTP program uses as defaults a wordlength of 3, and expectation (E) of 10, and the BLOSUM62 scoring matrix (see Henikoff & Henikoff, Proc. Natl. Acad. Sci. USA 89:10915 (1989)) alignments (B) of 50, expectation (E) of 10, M=5, N=−4, and a comparison of both strands.

[0069] The BLAST algorithm also performs a statistical analysis of the similarity between two sequences (see, e.g., Karlin & Altschul, Proc. Nat'l. Acad. Sci. USA 90:5873-5787 (1993)). One measure of similarity provided by the BLAST algorithm is the smallest sum probability (P(N)), which provides an indication of the probability by which a match between two nucleotide or amino acid sequences would occur by chance. For example, a nucleic acid is considered similar to a reference sequence if the smallest sum probability in a comparison of the test nucleic acid to the reference nucleic acid is less than about 0.2, more preferably less than about 0.01, and most preferably less than about 0.001. Log values may be large negative numbers, e.g., 5, 10, 20, 30, 40, 40, 70, 90, 110, 150, 170, etc.

[0070] An indication that two nucleic acid sequences or polypeptides are substantially identical is that the polypeptide encoded by the first nucleic acid is immunologically cross reactive with the antibodies raised against the polypeptide encoded by the second nucleic acid, as described below. Thus, a polypeptide is typically substantially identical to a second polypeptide, e.g., where the two peptides differ only by conservative substitutions. Another indication that two nucleic acid sequences are substantially identical is that the two molecules or their complements hybridize to each other under stringent conditions, as described below. Yet another indication that two nucleic acid sequences are substantially identical is that the same primers can be used to amplify the sequences.

[0071] A “host cell” is a naturally occurring cell or a transformed cell that contains an expression vector and supports the replication or expression of the expression vector. Host cells may be cultured cells, explants, cells in vivo, and the like. Host cells may be prokaryotic cells such as E. coli, or eukaryotic cells such as yeast, insect, amphibian, or mammalian cells such as CHO, HeLa, and the like (see, e.g., the American Type Culture Collection catalog or web site, www.atcc.org).

[0072] The terms “isolated,” “purified,” or “biologically pure” refer to material that is substantially or essentially free from components that normally accompany it as found in its native state. Purity and homogeneity are typically determined using analytical chemistry techniques such as polyacrylamide gel electrophoresis or high performance liquid chromatography. A protein or nucleic acid that is the predominant species present in a preparation is substantially purified. In particular, an isolated nucleic acid is separated from some open reading frames that naturally flank the gene and encode proteins other than protein encoded by the gene. The term “purified” in some embodiments denotes that a nucleic acid or protein gives rise to essentially one band in an electrophoretic gel. Preferably, it means that the nucleic acid or protein is at least 85% pure, more preferably at least 95% pure, and most preferably at least 99% pure. “Purify” or “purification” in other embodiments means removing at least one contaminant from the composition to be purified. In this sense, purification does not require that the purified compound be homogenous, e.g., 100% pure.

[0073] The terms “polypeptide,” “peptide” and “protein” are used interchangeably herein to refer to a polymer of amino acid residues. The terms apply to amino acid polymers in which one or more amino acid residue is an artificial chemical mimetic of a corresponding naturally occurring amino acid, as well as to naturally occurring amino acid polymers, those containing modified residues, and non-naturally occurring amino acid polymer.

[0074] The term “amino acid” refers to naturally occurring and synthetic amino acids, as well as amino acid analogs and amino acid mimetics that function similarly to the naturally occurring amino acids. Naturally occurring amino acids are those encoded by the genetic code, as well as those amino acids that are later modified, e.g., hydroxyproline, γ-carboxyglutamate, and O-phosphoserine. Amino acid analogs refers to compounds that have the same basic chemical structure as a naturally occurring amino acid, e.g., an a carbon that is bound to a hydrogen, a carboxyl group, an amino group, and an R group, e.g., homoserine, norleucine, methionine sulfoxide, methionine methyl sulfonium. Such analogs may have modified R groups (e.g., norleucine) or modified peptide backbones, but retain the same basic chemical structure as a naturally occurring amino acid. Amino acid mimetics refers to chemical compounds that have a structure that is different from the general chemical structure of an amino acid, but that functions similarly to a naturally occurring amino acid.

[0075] Amino acids may be referred to herein by either their commonly known three letter symbols or by the one-letter symbols recommended by the IUPAC-IUB Biochemical Nomenclature Commission. Nucleotides, likewise, may be referred to by their commonly accepted single-letter codes.

[0076] “Conservatively modified variants” applies to both amino acid and nucleic acid sequences. With respect to particular nucleic acid sequences, conservatively modified variants refers to those nucleic acids which encode identical or essentially identical amino acid sequences, or where the nucleic acid does not encode an amino acid sequence, to essentially identical or associated, e.g., naturally contiguous, sequences. Because of the degeneracy of the genetic code, a large number of functionally identical nucleic acids encode most proteins. For instance, the codons GCA, GCC, GCG and GCU all encode the amino acid alanine. Thus, at every position where an alanine is specified by a codon, the codon can be altered to another of the corresponding codons described without altering the encoded polypeptide. Such nucleic acid variations are “silent variations,” which are one species of conservatively modified variations. Every nucleic acid sequence herein which encodes a polypeptide also describes silent variations of the nucleic acid. One of skill will recognize that in certain contexts each codon in a nucleic acid (except AUG, which is ordinarily the only codon for methionine, and TGG, which is ordinarily the only codon for tryptophan) can be modified to yield a functionally identical molecule. Accordingly, often silent variations of a nucleic acid which encodes a polypeptide is implicit in a described sequence with respect to the expression product, but not with respect to actual probe sequences.

[0077] As to amino acid sequences, one of skill will recognize that individual substitutions, deletions or additions to a nucleic acid, peptide, polypeptide, or protein sequence which alters, adds or deletes a single amino acid or a small percentage of amino acids in the encoded sequence is a “conservatively modified variant” where the alteration results in the substitution of an amino acid with a chemically similar amino acid. Conservative substitution tables providing functionally similar amino acids are well known in the art. Such conservatively modified variants are in addition to and do not exclude polymorphic variants, interspecies homologs, and alleles of the invention.

[0078] The following eight groups each contain amino acids that are typically conservative substitutions for one another: 1) Alanine (A), Glycine (G); 2) Aspartic acid (D), Glutamic acid (E); 3) Asparagine (N), Glutamine (Q); 4) Arginine (R), Lysine (K); 5) Isoleucine (I), Leucine (L), Methionine (M), Valine (V); 6) Phenylalanine (F), Tyrosine (Y), Tryptophan (W); 7) Serine (S), Threonine (T); and 8) Cysteine (C), Methionine (M) (see, e.g., Creighton, Proteins (1984)).

[0079] Macromolecular structures such as polypeptide structures can be described in terms of various levels of organization. For a general discussion of this organization, see, e.g., Alberts et al., Molecular Biology of the Cell (3^{rd} ed., 1994) and Cantor & Schimmel, Biophysical Chemistry Part I: The Conformation of Biological Macromolecules (1980). “Primary structure” refers to the amino acid sequence of a particular peptide. “Secondary structure” refers to locally ordered, three dimensional structures within a polypeptide. These structures are commonly known as domains. Domains are portions of a polypeptide that often form a compact unit of the polypeptide and are typically 25 to approximately 500 amino acids long. Typical domains are made up of sections of lesser organization such as stretches of β-sheet and α-helices. “Tertiary structure” refers to the complete three dimensional structure of a polypeptide monomer. “Quaternary structure” refers to the three dimensional structure formed, usually by the noncovalent association of independent tertiary units. Anisotropic terms are also known as energy terms.

[0080] “Nucleic acid” or “oligonucleotide” or “polynucleotide” or grammatical equivalents used herein means at least two nucleotides covalently linked together. Oligonucleotides are typically from about 5, 6, 7, 8, 9, 10, 12, 15, 25, 30, 40, 50 or more nucleotides in length, up to about 100 nucleotides in length. Nucleic acids and polynucleotides are a polymers of any length, including longer lengths, e.g., 200, 300, 500, 1000, 2000, 3000, 5000, 7000, 10,000, etc. A nucleic acid of the present invention will generally contain phosphodiester bonds, although in some cases, nucleic acid analogs are included that may have alternate backbones, comprising, e.g., phosphoramidate, phosphorothioate, phosphorodithioate, or O-methylphophoroamidite linkages (see Eckstein, Oligonucleotides and Analogues: A Practical Approach, Oxford University Press); and peptide nucleic acid backbones and linkages. Other analog nucleic acids include those with positive backbones; non-ionic backbones, and non-ribose backbones, including those described in U.S. Pat. Nos. 5,235,033 and 5,034,506, and Chapters 6 and 7, ASC Symposium Series 580, Carbohydrate Modifications in Antisense Research, Sanghui & Cook, eds., Nucleic acids containing one or more carbocyclic sugars are also included within one definition of nucleic acids. Modifications of the ribose-phosphate backbone may be done for a variety of reasons, e.g. to increase the stability and half-life of such molecules in physiological environments or as probes on a biochip. Mixtures of naturally occurring nucleic acids and analogs can be made; alternatively, mixtures of different nucleic acid analogs, and mixtures of naturally occurring nucleic acids and analogs may be made.

[0081] Particularly preferred are peptide nucleic acids (PNA) which includes peptide nucleic acid analogs. These backbones are substantially non-ionic under neutral conditions, in contrast to the highly charged phosphodiester backbone of naturally occurring nucleic acids. This results in two advantages. First, the PNA backbone exhibits improved hybridization kinetics. PNAs have larger changes in the melting temperature (Tₘ) for mismatched versus perfectly matched basepairs. DNA and RNA typically exhibit a 2-4° C. drop in Tₘ for an internal mismatch. With the non-ionic PNA backbone, the drop is closer to 7-9° C. Similarly, due to their non-ionic nature, hybridization of the bases attached to these backbones is relatively insensitive to salt concentration. In addition, PNAs are not degraded by cellular enzymes, and thus can be more stable.

[0082] The nucleic acids may be single stranded or double stranded, as specified, or contain portions of both double stranded or single stranded sequence. As will be appreciated by those in the art, the depiction of a single strand also defines the sequence of the complementary strand; thus the sequences described herein also provide the complement of the sequence. The nucleic acid may be DNA, both genomic and cDNA, RNA or a hybrid, where the nucleic acid may contain combinations of deoxyribo- and ribo-nucleotides, and combinations of bases, including uracil, adenine, thymine, cytosine, guanine, inosine, xanthine hypoxanthine, isocytosine, isoguanine, etc. “Transcript” typically refers to a naturally occurring RNA, e.g., a pre-mRNA, hnRNA, or mRNA. As used herein, the term “nucleoside” includes nucleotides and nucleoside and nucleotide analogs, and modified nucleosides such as amino modified nucleosides. In addition, “nucleoside” includes non-naturally occurring analog structures. Thus, e.g. the individual units of a peptide nucleic acid, each containing a base, are referred to herein as a nucleoside.

[0083] A “label” or a “detectable moiety” is a composition detectable by spectroscopic, photochemical, biochemical, immunochemical, chemical, or other physical means. For example, useful labels include ³²P, fluorescent dyes, electron-dense reagents, enzymes (e.g., as commonly used in an ELISA), biotin, digoxigenin, or haptens and proteins or other entities which can be made detectable, e.g., by incorporating a radiolabel into the peptide or used to detect antibodies specifically reactive with the peptide.

[0084] An “effector” or “effector moiety” or “effector component” is a molecule that is bound (or linked, or conjugated), either covalently, through a linker or a chemical bond, or noncovalently, through ionic, van der Waals, electrostatic, or hydrogen bonds, to an antibody. The “effector” can be a variety of molecules including, e.g., detection moieties including radioactive compounds, fluorescent compounds, an enzyme or substrate, tags such as epitope tags, a toxin; activatable moieties, a chemotherapeutic agent; a lipase; an antibiotic; or a radioisotope emitting “hard” e.g., beta radiation.

[0085] A “labeled nucleic acid probe or oligonucleotide” is one that is bound, either covalently, through a linker or a chemical bond, or noncovalently, through ionic, van der Waals, electrostatic, or hydrogen bonds to a label such that the presence of the probe may be detected by detecting the presence of the label bound to the probe. Alternatively, method using high affinity interactions may achieve the same results where one of a pair of binding partners binds to the other, e.g., biotin, streptavidin.

[0086] As used herein a “nucleic acid probe or oligonucleotide” is defined as a nucleic acid capable of binding to a target nucleic acid of complementary sequence through one or more types of chemical bonds, usually through complementary base pairing, usually through hydrogen bond formation. As used herein, a probe may include natural (i.e., A, G, C, or T) or modified bases (7-deazaguanosine, inosine, etc.). In addition, the bases in a probe may be joined by a linkage other than a phosphodiester bond, so long as it does not functionally interfere with hybridization. Thus, e.g., probes may be peptide nucleic acids in which the constituent bases are joined by peptide bonds rather than phosphodiester linkages. It will be understood by one of skill in the art that probes may bind target sequences lacking complete complementarity with the probe sequence depending upon the stringency of the hybridization conditions. The probes are preferably directly labeled as with isotopes, chromophores, lumiphores, chromogens, or indirectly labeled such as with biotin to which a streptavidin complex may later bind. By assaying for the presence or absence of the probe, one can detect the presence or absence of the select sequence or subsequence. Diagnosis or prognosis may be based at the genomic level, or at the level of RNA or protein expression.

[0087] The term “recombinant” when used with reference, e.g., to a cell, or nucleic acid, protein, or vector, indicates that the cell, nucleic acid, protein or vector, has been modified by the introduction of a heterologous nucleic acid or protein or the alteration of a native nucleic acid or protein, or that the cell is derived from a cell so modified. Thus, e.g., recombinant cells express genes that are not found within the native (non-recombinant) form of the cell or express native genes that are otherwise abnormally expressed, under expressed or not expressed at all. By the term “recombinant nucleic acid” herein is meant nucleic acid, originally formed in vitro, in general, by the manipulation of nucleic acid, e.g., using polymerases and endonucleases, in a form not normally found in nature. In this manner, operably linkage of different sequences is achieved. Thus an isolated nucleic acid, in a linear form, or an expression vector formed in vitro by ligating DNA molecules that are not normally joined, are both considered recombinant for the purposes of this invention. It is understood that once a recombinant nucleic acid is made and reintroduced into a host cell or organism, it will replicate non-recombinantly, i.e., using the in vivo cellular machinery of the host cell rather than in vitro manipulations; however, such nucleic acids, once produced recombinantly, although subsequently replicated non-recombinantly, are still considered recombinant for the purposes of the invention. Similarly, a “recombinant protein” is a protein made using recombinant techniques, i.e., through the expression of a recombinant nucleic acid as depicted above.

[0088] The term “heterologous” when used with reference to portions of a nucleic acid indicates that the nucleic acid comprises two or more subsequences that are not normally found in the same relationship to each other in nature. For instance, the nucleic acid is typically recombinantly produced, having two or more sequences, e.g., from unrelated genes arranged to make a new functional nucleic acid, e.g., a promoter from one source and a coding region from another source. Similarly, a heterologous protein will often refer to two or more subsequences that are not found in the same relationship to each other in nature (e.g., a fusion protein).

[0089] A “promoter” is defined as an array of nucleic acid control sequences that direct transcription of a nucleic acid. As used herein, a promoter includes necessary nucleic acid sequences near the start site of transcription, such as, in the case of a polymerase II type promoter, a TATA element. A promoter also optionally includes distal enhancer or repressor elements, which can be located as much as several thousand base pairs from the start site of transcription. A “constitutive” promoter is a promoter that is active under most environmental and developmental conditions. An “inducible” promoter is a promoter that is active under environmental or developmental regulation. The term “operably linked” refers to a functional linkage between a nucleic acid expression control sequence (such as a promoter, or array of transcription factor binding sites) and a second nucleic acid sequence, wherein the expression control sequence directs transcription of the nucleic acid corresponding to the second sequence.

[0090] An “expression vector” is a nucleic acid construct, generated recombinantly or synthetically, with a series of specified nucleic acid elements that permit transcription of a particular nucleic acid in a host cell. The expression vector can be part of a plasmid, virus, or nucleic acid fragment. Typically, the expression vector includes a nucleic acid to be transcribed operably linked to a promoter.

[0091] The phrase “selectively (or specifically) hybridizes to” refers to the binding, duplexing, or hybridizing of a molecule only to a particular nucleotide sequence under stringent hybridization conditions when that sequence is present in a complex mixture (e.g., total cellular or library DNA or RNA).

[0092] The phrase “stringent hybridization conditions” refers to conditions under which a probe will hybridize to its target subsequence, typically in a complex mixture of nucleic acids, but to essentially no other sequences. Stringent conditions are sequence-dependent and will be different in different circumstances. Longer sequences hybridize specifically at higher temperatures. An extensive guide to the hybridization of nucleic acids is found in Tijssen, Techniques in Biochemistry and Molecular Biology—Hybridization with Nucleic Probes, “Overview of principles of hybridization and the strategy of nucleic acid assays” (1993). Generally, stringent conditions are selected to be about 5-10° C. lower than the thermal melting point (Tₘ) for the specific sequence at a defined ionic strength pH. The Tₘ is the temperature (under defined ionic strength, pH, and nucleic concentration) at which 50% of the probes complementary to the target hybridize to the target sequence at equilibrium (as the target sequences are present in excess, at Tₘ, 50% of the probes are occupied at equilibrium). Stringent conditions will be those in which the salt concentration is less than about 1.0 M sodium ion, typically about 0.01 to 1.0 M sodium ion concentration (or other salts) at pH 7.0 to 8.3 and the temperature is at least about 30° C. for short probes (e.g., 10 to 50 nucleotides) and at least about 60° C. for long probes (e.g., greater than 50 nucleotides). Stringent conditions may also be achieved with the addition of destabilizing agents such as formamide. For selective or specific hybridization, a positive signal is at least two times background, preferably 10 times background hybridization. Exemplary stringent hybridization conditions are often: 50% formamide, 5×SSC, and 1% SDS, incubating at 42° C., or, 5×SSC, 1% SDS, incubating at 65° C., with wash in 0.2×SSC, and 0.1% SDS at 65° C. For PCR, a temperature of about 36° C. is typical for low stringency amplification, although annealing temperatures may vary between about 32° C. and 48° C. depending on primer length. For high stringency PCR amplification, a temperature of about 62° C. is typical, although high stringency annealing temperatures can range from about 50° C. to about 65° C., depending on the primer length and specificity. Typical cycle conditions for both high and low stringency amplifications include a denaturation phase of 90° C.-95° C. for 30 sec-2 min., an annealing phase lasting 30 sec.-2 min., and an extension phase of about 72° C. for 1 -2 min. Protocols and guidelines for low and high stringency amplification reactions are provided, e.g., in Innis et al., PCR Protocols, A Guide to Methods and Applications (1990).

[0093] Nucleic acids that do not hybridize to each other under stringent conditions are still substantially identical if the polypeptides which they encode are substantially identical. This occurs, e.g., when a copy of a nucleic acid is created using the maximum codon degeneracy permitted by the genetic code. In such cases, the nucleic acids typically hybridize under moderately stringent hybridization conditions. Exemplary “moderately stringent hybridization conditions” include a hybridization in a buffer of 40% formamide, 1 M NaCl, 1% SDS at 37° C., and a wash in 1×SSC at 45° C. A positive hybridization is at least twice background. Those of ordinary skill will readily recognize that alternative hybridization and wash conditions can be utilized to provide conditions of similar stringency. Additional guidelines for determining hybridization parameters are provided in numerous reference, e.g., see, e.g., Current Protocols in Molecular Biology (Ausubel et al., eds. 1995 supplement).

[0094] The phrase “functional effects” in the context of assays for testing compounds that modulate activity of a metastatic breast cancer or metastatic lung cancer protein includes the determination of a parameter that is indirectly or directly under the influence of the metastatic breast cancer or metastatic lung cancer protein or nucleic acid, e.g., an enzymatic, functional, physical, or chemical effect, such as the ability to decrease metastatic breast cancer or metastatic lung cancer. It includes ligand binding activity; cell growth on soft agar; anchorage dependence; contact inhibition and density limitation of growth; cellular proliferation; cellular transformation; growth factor or serum dependence; tumor specific marker levels; invasiveness into Matrigel; tumor growth and metastasis in vivo; mRNA and protein expression in cells undergoing metastasis, and other characteristics of metastatic breast cancer or metastatic lung cancer cells. “Functional effects” include in vitro, in vivo, and ex vivo activities.

[0095] By “determining the functional effect” is meant assaying for a compound that increases or decreases a parameter that is indirectly or directly under the influence of a metastatic breast cancer or metastatic lung cancer protein sequence, e.g., functional, enzymatic, physical and chemical effects. Such functional effects can be measured by any means known to those skilled in the art, e.g., changes in spectroscopic characteristics (e.g., fluorescence, absorbance, refractive index), hydrodynamic (e.g., shape), chromatographic, or solubility properties for the protein, measuring inducible markers or transcriptional activation of the metastatic breast cancer or metastatic lung cancer protein; measuring binding activity or binding assays, e.g., binding to antibodies or other ligands, and measuring cellular proliferation. Determination of the functional effect of a compound on metastatic breast cancer or metastatic lung cancer can also be performed using metastatic breast cancer or metastatic lung cancer assays known to those of skill in the art such as an in vitro assays, e.g., cell growth on soft agar; anchorage dependence; contact inhibition and density limitation of growth; cellular proliferation; cellular transformation; growth factor or serum dependence; tumor specific marker levels; invasiveness into Matrigel; tumor growth and metastasis in vivo; mRNA and protein expression in cells undergoing metastasis, and other characteristics of metastatic breast cancer or metastatic lung cancer cells. The functional effects can be evaluated by many means known to those skilled in the art, e.g., microscopy for quantitative or qualitative measures of alterations in morphological features, measurement of changes in RNA or protein levels for metastatic breast cancer or metastatic lung cancer-associated sequences, measurement of RNA stability, identification of downstream or reporter gene expression (CAT, luciferase, β-gal, GFP and the like), e.g., via chemiluminescence, fluorescence, calorimetric reactions, antibody binding, inducible markers, and ligand binding assays.

[0096] “Inhibitors”, “activators”, and “modulators” of metastatic breast cancer or metastatic lung cancer polynucleotide and polypeptide sequences are used to refer to activating, inhibitory, or modulating molecules or compounds identified using in vitro and in vivo assays of metastatic breast cancer or metastatic lung cancer polynucleotide and polypeptide sequences of the invention. Inhibitors are compounds that, e.g., bind to, partially or totally block activity, decrease, prevent, delay activation, inactivate, desensitize, or down regulate the activity or expression of metastatic breast cancer or metastatic lung cancer proteins of the invention, e.g., antagonists. Antisense nucleic acids may seem to inhibit expression and subsequent function of the protein. “Activators” are compounds that increase, open, activate, facilitate, enhance activation, sensitize, agonize, or up regulate metastatic breast cancer or metastatic lung cancer protein activity. Inhibitors, activators, or modulators also include genetically modified versions of metastatic breast cancer or metastatic lung cancer proteins, e.g., versions with altered activity, as well as naturally occurring and synthetic ligands, antagonists, agonists, antibodies, small chemical molecules and the like. Such assays for inhibitors and activators include, e.g., expressing the metastatic breast cancer or metastatic lung cancer protein in vitro, in cells, or cell membranes, applying putative modulator compounds, and then determining the functional effects on activity, as described above. Activators and inhibitors of metastatic breast cancer or metastatic lung cancer can also be identified by incubating metastatic breast cancer or metastatic lung cancer cells with the test compound and determining increases or decreases in the expression of 1 or more metastatic breast cancer or metastatic lung cancer proteins, e.g., 1, 2, 3, 4, 5, 10, 15, 20, 25, 30, 40, 50 or more metastatic breast cancer or metastatic lung cancer proteins, such as metastatic breast cancer or metastatic lung cancer proteins encoded by the sequences set out in Tables 1-12.

[0097] Samples or assays comprising metastatic breast cancer or metastatic lung cancer proteins that are treated with a potential activator, inhibitor, or modulator are compared to control samples without the inhibitor, activator, or modulator to examine the extent of inhibition. Control samples (untreated with inhibitors) are assigned a relative protein activity value of 100%. Inhibition of a polypeptide is achieved when the activity value relative to the control is about 80%, preferably 50%, more preferably 25-0%. Activation of a metastatic breast cancer or metastatic lung cancer polypeptide is achieved when the activity value relative to the control (untreated with activators) is 110%, more preferably 150%, more preferably 200-500% (i.e., two to five fold higher relative to the control), more preferably 1000-3000% higher.

[0098] The phrase “changes in cell growth” refers to any change in cell growth and proliferation characteristics in vitro or in vivo, such as formation of foci, anchorage independence, semi-solid or soft agar growth, changes in contact inhibition and density limitation of growth, loss of growth factor or serum requirements, changes in cell morphology, gaining or losing immortalization, gaining or losing tumor specific markers, ability to form or suppress tumors when injected into suitable animal hosts, and/or immortalization of the cell. See, e.g., Freshney, Culture of Animal Cells a Manual of Basic Technique pp. 231-241 (3^{rd} ed. 1994).

[0099] “Tumor cell” refers to precancerous, cancerous, and normal cells in a tumor. “Cancer cells,” “transformed” cells or “transformation” in tissue culture, refers to spontaneous or induced phenotypic changes that do not necessarily involve the uptake of new genetic material. Although transformation can arise from infection with a transforming virus and incorporation of new genomic DNA, or uptake of exogenous DNA, it can also arise spontaneously or following exposure to a carcinogen, thereby mutating an endogenous gene. Transformation is associated with phenotypic changes, such as immortalization of cells, aberrant growth control, nonmorphological changes, and/or malignancy (see, Freshney, Culture of Animal Cells a Manual ofBasic Technique (3^{rd} ed. 1994)).

[0100] “Antibody” refers to a polypeptide comprising a framework region from an immunoglobulin gene or fragments thereof that specifically binds and recognizes an antigen. The recognized immunoglobulin genes include the kappa, lambda, alpha, gamma, delta, epsilon, and mu constant region genes, as well as the myriad immunoglobulin variable region genes. Light chains are classified as either kappa or lambda. Heavy chains are classified as gamma, mu, alpha, delta, or epsilon, which in turn define the immunoglobulin classes, IgG, IgM, IgA, IgD and IgE, respectively. Typically, the antigen-binding region of an antibody or its functional equivalent will be most critical in specificity and affinity of binding. See Paul, Fundamental Immunology.

[0101] An exemplary immunoglobulin (antibody) structural unit comprises a tetramer. Each tetramer is composed of two identical pairs of polypeptide chains, each pair having one “light” (about 25 kD) and one “heavy” chain (about 50-70 kD). The N-terminus of each chain defines a variable region of about 100 to 110 or more amino acids primarily responsible for antigen recognition. The terms variable light chain (V_{L}) and variable heavy chain (V_{H}) refer to these light and heavy chains respectively.

[0102] Antibodies exist, e.g., as intact immunoglobulins or as a number of well-characterized fragments produced by digestion with various peptidases. Thus, e.g., pepsin digests an antibody below the disulfide linkages in the hinge region to produce F(ab′)₂, a dimer of Fab which itself is a light chain joined to V_{H}-C_{H}1 by a disulfide bond. The F(ab′)₂ may be reduced under mild conditions to break the disulfide linkage in the hinge region, thereby converting the F(ab′)′₂ dimer into an Fab′ monomer. The Fab′ monomer is essentially Fab with part of the hinge region (see Fundamental Immunology (Paul ed., 3d ed. 1993). While various antibody fragments are defined in terms of the digestion of an intact antibody, one of skill will appreciate that such fragments may be synthesized de novo either chemically or by using recombinant DNA methodology. Thus, the term antibody, as used herein, also includes antibody fragments either produced by the modification of whole antibodies, or those synthesized de novo using recombinant DNA methodologies (e.g., single chain Fv) or those identified using phage display libraries (see, e.g., McCafferty et al., Nature 348:552-554 (1990))

[0103] For preparation of antibodies, e.g., recombinant, monoclonal, or polyclonal antibodies, many technique known in the art can be used (see, e.g., Kohler & Milstein, Nature 256:495-497 (1975); Kozbor et al., Immunology Today 4:72 (1983); Cole et al., pp. 77-96 in Monoclonal Antibodies and Cancer Therapy (1985); Coligan, Current Protocols in Immunology (1991); Harlow & Lane, Antibodies, A Laboratory Manual (1988); and Goding, Monoclonal Antibodies: Principles and Practice (2d ed. 1986)). Techniques for the production of single chain antibodies (U.S. Pat. No. 4,946,778) can be adapted to produce antibodies to polypeptides of this invention. Also, transgenic mice, or other organisms such as other mammals, may be used to express humanized antibodies. Alternatively, phage display technology can be used to identify antibodies and heteromeric Fab fragments that specifically bind to selected antigens (see, e.g., McCafferty et al., Nature 348:552-554 (1990); Marks et al., Biotechnology 10:779-783 (1992)).

[0104] A “chimeric antibody” is an antibody molecule in which, e.g, (a) the constant region, or a portion thereof, is altered, replaced or exchanged so that the antigen binding site (variable region) is linked to a constant region of a different or altered class, effector function and/or species, or an entirely different molecule which confers new properties to the chimeric antibody, e.g., an enzyme, toxin, hormone, growth factor, drug, etc.; or (b) the variable region, or a portion thereof, is altered, replaced or exchanged with a variable region having a different or altered antigen specificity.

### Identification of Metastatic Breast Cancer or Metastatic Lung Cancer-associated Sequences

[0105] In one aspect, the expression levels of genes are determined in different patient samples for which diagnosis information is desired, to provide expression profiles. An expression profile of a particular sample is essentially a “fingerprint” of the state of the sample; while two states may have any particular gene similarly expressed, the evaluation of a number of genes simultaneously allows the generation of a gene expression profile that is characteristic of the state of the cell. That is, normal tissue may be distinguished from cancerous or metastatic cancerous tissue, or metastatic cancerous tissue can be compared with tissue from surviving cancer patients. By comparing expression profiles of tissue in known different metastatic breast cancer or metastatic lung cancer states, information regarding which genes are important (including both up- and down-regulation of genes) in each of these states is obtained.

[0106] The identification of sequences that are differentially expressed in metastatic breast cancer or metastatic lung cancer versus non-metastatic breast cancer or non-metastatic lung cancer tissue allows the use of this information in a number of ways. For example, a particular treatment regime may be evaluated: does a chemotherapeutic drug act to down-regulate metastatic breast cancer or metastatic lung cancer, and thus tumor growth or recurrence, in a particular patient. Similarly, diagnosis and treatment outcomes may be done or confirmed by comparing patient samples with the known expression profiles. Metastatic tissue can also be analyzed to determine the stage of metastatic breast cancer or metastatic lung cancer in the tissue. Furthermore, these gene expression profiles (or individual genes) allow screening of drug candidates with an eye to mimicking or altering a particular expression profile; e.g., screening can be done for drugs that suppress the metastatic breast cancer or metastatic lung cancer expression profile. This may be done by making biochips comprising sets of the important metastatic breast cancer or metastatic lung cancer genes, which can then be used in these screens. PCR methods may be applied with selected primer pairs, and analysis may be of RNA or of genomic sequences. These methods can also be done on the protein basis; that is, protein expression levels of the metastatic breast cancer or metastatic lung cancer proteins can be evaluated for diagnostic purposes or to screen candidate agents. In addition, the metastatic breast cancer or metastatic lung cancer nucleic acid sequences can be administered for gene therapy purposes, including the administration of antisense nucleic acids, or the metastatic breast cancer or metastatic lung cancer proteins (including antibodies and other modulators thereof) administered as therapeutic drugs or as protein or DNA vaccines.

[0107] Thus the present invention provides nucleic acid and protein sequences that are differentially expressed in metastatic breast cancer or metastatic lung cancer, herein termed “metastatic breast cancer or metastatic lung cancer sequences.” As outlined below, metastatic breast cancer or metastatic lung cancer sequences include those that are up- regulated (i.e., expressed at a higher level) in metastatic breast cancer or metastatic lung cancer, as well as those that are down-regulated (i.e., expressed at a lower level). In a preferred embodiment, the metastatic breast cancer or metastatic lung cancer sequences are from humans; however, as will be appreciated by those in the art, metastatic breast cancer or metastatic lung cancer sequences from other organisms may be useful in animal models of disease and drug evaluation; thus, other metastatic breast cancer or metastatic lung cancer sequences are provided, from vertebrates, including mammals, including rodents (rats, mice, hamsters, guinea pigs, etc.), primates, farm animals (including sheep, goats, pigs, cows, horses, etc.) and pets (dogs, cats, etc.). Metastatic breast cancer or metastatic lung cancer sequences from other organisms may be obtained using the techniques outlined below.

[0108] Metastatic breast cancer or metastatic lung cancer sequences can include both nucleic acid and amino acid sequences. As will be appreciated by those in the art and is more fully outlined below, metastatic breast cancer or metastatic lung cancer nucleic acid sequences are useful in a variety of applications, including diagnostic applications, which will detect naturally occurring nucleic acids, as well as screening applications; e.g., biochips comprising nucleic acid probes or PCR microtiter plates with selected probes to the metastatic breast cancer or metastatic lung cancer sequences can be generated.

[0109] A metastatic breast cancer or metastatic lung cancer sequence can be initially identified by substantial nucleic acid and/or amino acid sequence homology to the metastatic breast cancer or metastatic lung cancer sequences outlined herein. Such homology can be based upon the overall nucleic acid or amino acid sequence, and is generally determined as outlined below, using either homology programs or hybridization conditions.

[0110] For identifying metastatic breast cancer or metastatic lung cancer-associated sequences, the metastatic breast cancer or metastatic lung cancer screen typically includes comparing genes identified in different tissues, e.g., normal and cancerous tissues, or tumor tissue samples from patients who have metastatic disease vs. non metastatic tissue, or tumor tissue samples from patients who have been diagnosed cancer but have survived vs. metastatic tissue. Other suitable tissue comparisons include comparing metastatic breast cancer or metastatic lung cancer samples with metastatic cancer samples from other cancers, such as gastrointestinal cancers, prostate, ovarian, etc. Samples of, e.g., breast cancer survivor tissue and tissue undergoing metastasis are applied to biochips comprising nucleic acid probes. The samples are first microdissected, if applicable, and treated as is known in the art for the preparation of mRNA. Suitable biochips are commercially available, e.g., GENECHIP® (DNA microarray) technology from Affymetrix, Inc. (Santa Clara, Calif.). Gene expression profiles as described herein are generated and the data analyzed.

[0111] In one embodiment, the genes showing changes in expression as between normal and disease states are compared to genes expressed in other normal tissues, preferably normal colon, but also including, and not limited to lung, heart, brain, liver, breast, kidney, muscle, prostate, small intestine, large intestine, spleen, bone and placenta. In a preferred embodiment, those genes identified during the metastatic breast cancer or metastatic lung cancer screen that are expressed in significant amounts in other tissues are removed from the profile, although in some embodiments, this is not necessary. That is, when screening for drugs, it is usually preferable that the target be disease specific, to minimize possible side effects.

[0112] In a preferred embodiment, metastatic breast cancer or metastatic lung cancer sequences are those that are up-regulated in metastatic breast cancer or metastatic lung cancer; that is, the expression of these genes is higher in the metastatic tissue as compared to non-metastatic cancerous tissue or normal tissue (see, e.g., Tables 1-3, 6-8, 11-12). “Up-regulation” as used herein means, when the ratio is presented as a number greater than one, that the ratio is greater than one, preferably 1.5 or greater, more preferably 2.0 or greater. All UniGene cluster identification numbers and accession numbers herein are for the GenBank sequence database and the sequences of the accession numbers are hereby expressly incorporated by reference. GenBank is known in the art, see, e.g., Benson, D A, et al., Nucleic Acids Research 26:1-7 (1998) and. Sequences are also available in other databases, e.g., European Molecular Biology Laboratory (EMBL) and DNA Database of Japan (DDBJ).

[0113] In another preferred embodiment, metastatic breast cancer or metastatic lung cancer sequences are those that are down-regulated in the metastatic breast cancer or metastatic lung cancer; that is, the expression of these genes is lower in metastatic tissue as compared to non-metastatic cancerous tissue or normal tissue (see, e.g., Tables 4-5 and 9-10). “Down-regulation” as used herein means, when the ratio is presented as a number greater than one, that the ratio is greater than one, preferably 1.5 or greater, more preferably 2.0 or greater, or, when the ratio is presented as a number less than one, that the ratio is less than one, preferably 0.5 or less, more preferably 0.25 or less.

Informatics

[0114] The ability to identify genes that are over or under expressed in metastatic breast cancer or metastatic lung cancer can additionally provide high-resolution, high-sensitivity datasets which can be used in the areas of diagnostics, therapeutics, drug development, pharmacogenetics, protein structure, biosensor development, and other related areas. For example, the expression profiles can be used in diagnostic or prognostic evaluation of patients with metastatic breast cancer or metastatic lung cancer. Or as another example, subcellular toxicological information can be generated to better direct drug structure and activity correlation (see Anderson, Pharmaceutical Proteomics: Targets, Mechanism, and Function, paper presented at the IBC Proteomics conference, Coronado, Calif. (June 11-12, 1998)). Subcellular toxicological information can also be utilized in a biological sensor device to predict the likely toxicological effect of chemical exposures and likely tolerable exposure thresholds (see U.S. Pat. No. 5,811,231). Similar advantages accrue from datasets relevant to other biomolecules and bioactive agents (e.g., nucleic acids, saccharides, lipids, drugs, and the like).

[0115] Thus, in another embodiment, the present invention provides a database that includes at least one set of assay data. The data contained in the database is acquired, e.g., using array analysis either singly or in a library format. The database can be in substantially any form in which data can be maintained and transmitted, but is preferably an electronic database. The electronic database of the invention can be maintained on any electronic device allowing for the storage of and access to the database, such as a personal computer, but is preferably distributed on a wide area network, such as the World Wide Web.

[0116] The focus of the present section on databases that include peptide sequence data is for clarity of illustration only. It will be apparent to those of skill in the art that similar databases can be assembled for assay data acquired using an assay of the invention.

[0117] The compositions and methods for identifying and/or quantitating the relative and/or absolute abundance of a variety of molecular and macromolecular species from a biological sample undergoing metastatic breast cancer or metastatic lung cancer, i.e., the identification of metastatic breast cancer or metastatic lung cancer-associated sequences described herein, provide an abundance of information, which can be correlated with pathological conditions, predisposition to disease, drug testing, therapeutic monitoring, gene-disease causal linkages, identification of correlates of immunity and physiological status, among others. Although the data generated from the assays of the invention is suited for manual review and analysis, in a preferred embodiment, prior data processing using high-speed computers is utilized.

[0118] An array of methods for indexing and retrieving biomolecular information is known in the art. For example, U.S. Pat. Nos. 6,023,659 and 5,966,712 disclose a relational database system for storing biomolecular sequence information in a manner that allows sequences to be catalogued and searched according to one or more protein finction hierarchies. U.S. Pat. No. 5,953,727 discloses a relational database having sequence records containing information in a format that allows a collection of partial-length DNA sequences to be catalogued and searched according to association with one or more sequencing projects for obtaining full-length sequences from the collection of partial length sequences. U.S. Pat. No. 5,706,498 discloses a gene database retrieval system for making a retrieval of a gene sequence similar to a sequence data item in a gene database based on the degree of similarity between a key sequence and a target sequence. U.S. Pat. No. 5,538,897 discloses a method using mass spectroscopy fragmentation patterns of peptides to identify amino acid sequences in computer databases by comparison of predicted mass spectra with experimentally-derived mass spectra using a closeness-of-fit measure. U.S. Pat. No. 5,926,818 discloses a multi-dimensional database comprising a functionality for multi-dimensional data analysis described as on-line analytical processing (OLAP), which entails the consolidation of projected and actual data according to more than one consolidation path or dimension. U.S. Pat. No. 5,295,261 reports a hybrid database structure in which the fields of each database record are divided into two classes, navigational and informational data, with navigational fields stored in a hierarchical topological map which can be viewed as a tree structure or as the merger of two or more such tree structures.

[0119] See also Mount et al., Bioinformatics (2001); Biological Sequence Analysis: Probabilistic Models of Proteins and Nucleic Acids (Durbin et al., eds., 1999); Bioinformatics: A Practical Guide to the Analysis of Genes and Proteins (Baxevanis & Oeullette eds., 1998)); Rashidi & Buehler, Bioinformatics: Basic Applications in Biological Science and Medicine (1999); Introduction to Computational Molecular Biology (Setubal et al., eds 1997); Bioinformatics: Methods and Protocols (Misener & Krawetz, eds, 2000); Bioinformatics: Sequence, Structure, and Databanks: A Practical Approach (Higgins & Taylor, eds., 2000); Brown, Bioinformatics: A Biologist's Guide to Biocomputing and the Internet (2001); Han & Kamber, Data Mining: Concepts and Techniques (2000); and Waterman, Introduction to Computational Biology: Maps, Sequences, and Genomes (1995).

[0120] The present invention provides a computer database comprising a computer and software for storing in computer-retrievable form assay data records cross-tabulated, e.g., with data specifying the source of the target-containing sample from which each sequence specificity record was obtained.

[0121] In an exemplary embodiment, at least one of the sources of target-containing sample is from a control tissue sample known to be free of pathological disorders. In a variation, at least one of the sources is a known pathological tissue specimen, e.g., a neoplastic lesion or another tissue specimen to be analyzed for metastatic breast cancer or metastatic lung cancer. In another variation, the assay records cross-tabulate one or more of the following parameters for each target species in a sample: (1) a unique identification code, which can include, e.g., a target molecular structure and/or characteristic separation coordinate (e.g., electrophoretic coordinates); (2) sample source; and (3) absolute and/or relative quantity of the target species present in the sample.

[0122] The invention also provides for the storage and retrieval of a collection of target data in a computer data storage apparatus, which can include magnetic disks, optical disks, magneto-optical disks, DRAM, SRAM, SGRAM, SDRAM, RDRAM, DDR RAM, magnetic bubble memory devices, and other data storage devices, including CPU registers and on-CPU data storage arrays. Typically, the target data records are stored as a bit pattern in an array of magnetic domains on a magnetizable medium or as an array of charge states or transistor gate states, such as an array of cells in a DRAM device (e.g., each cell comprised of a transistor and a charge storage area, which may be on the transistor). In one embodiment, the invention provides such storage devices, and computer systems built therewith, comprising a bit pattern encoding a protein expression fingerprint record comprising unique identifiers for at least 10 target data records cross-tabulated with target source.

[0123] When the target is a peptide or nucleic acid, the invention preferably provides a method for identifying related peptide or nucleic acid sequences, comprising performing a computerized comparison between a peptide or nucleic acid sequence assay record stored in or retrieved from a computer storage device or database and at least one other sequence. The comparison can include a sequence analysis or comparison algorithm or computer program embodiment thereof (e.g., FASTA, TFASTA, GAP, BESTFIT) and/or the comparison may be of the relative amount of a peptide or nucleic acid sequence in a pool of sequences determined from a polypeptide or nucleic acid sample of a specimen.

[0124] The invention also preferably provides a magnetic disk, such as an IBM-compatible (DOS, Windows, Windows95/98/2000, Windows NT, OS/2) or other format (e.g., Linux, SunOS, Solaris, AIX, SCO Unix, VMS, MV, Macintosh, etc.) floppy diskette or hard (fixed, Winchester) disk drive, comprising a bit pattern encoding data from an assay of the invention in a file format suitable for retrieval and processing in a computerized sequence analysis, comparison, or relative quantitation method.

[0125] The invention also provides a network, comprising a plurality of computing devices linked via a data link, such as an Ethernet cable (coax or 1OBaseT), telephone line, ISDN line, wireless network, optical fiber, or other suitable signal transmission medium, whereby at least one network device (e.g., computer, disk array, etc.) comprises a pattern of magnetic domains (e.g., magnetic disk) and/or charge domains (e.g., an array of DRAM cells) composing a bit pattern encoding data acquired from an assay of the invention.

[0126] The invention also provides a method for transmitting assay data that includes generating an electronic signal on an electronic communications device, such as a modem, ISDN terminal adapter, DSL, cable modem, ATM switch, or the like, wherein the signal includes (in native or encrypted format) a bit pattern encoding data from an assay or a database comprising a plurality of assay results obtained by the method of the invention.

[0127] In a preferred embodiment, the invention provides a computer system for comparing a query target to a database containing an array of data structures, such as an assay result obtained by the method of the invention, and ranking database targets based on the degree of identity and gap weight to the target data. A central processor is preferably initialized to load and execute the computer program for alignment and/or comparison of the assay results. Data for a query target is entered into the central processor via an I/O device. Execution of the computer program results in the central processor retrieving the assay data from the data file, which comprises a binary description of an assay result.

[0128] The target data or record and the computer program can be transferred to secondary memory, which is typically random access memory (e.g., DRAM, SRAM, SGRAM, or SDRAM). Targets are ranked according to the degree of correspondence between a selected assay characteristic (e.g., binding to a selected affinity moiety) and the same characteristic of the query target and results are output via an I/O device. For example, a central processor can be a conventional computer (e.g., Intel Pentium, PowerPC, Alpha, PA-8000, SPARC, MIPS 4400, MIPS 10000, VAX, etc.); a program can be a commercial or public domain molecular biology software package (e.g., UWGCG Sequence Analysis Software, Darwin); a data file can be an optical or magnetic disk, a data server, a memory device (e.g., DRAM, SRAM, SGRAM, SDRAM, EPROM, bubble memory, flash memory, etc.); an I/O device can be a terminal comprising a video display and a keyboard, a modem, an ISDN terminal adapter, an Ethernet port, a punched card reader, a magnetic strip reader, or other suitable I/O device.

[0129] The invention also preferably provides the use of a computer system, such as that described above, which comprises: (1) a computer; (2) a stored bit pattern encoding a collection of peptide sequence specificity records obtained by the methods of the invention, which may be stored in the computer; (3) a comparison target, such as a query target; and (4) a program for alignment and comparison, typically with rank-ordering of comparison results on the basis of computed similarity values.

### Characteristics of Metastatic Breast Cancer or Metastatic Lung Cancer-associated Proteins

[0130] Metastatic breast cancer or metastatic lung cancer proteins of the present invention may be classified as secreted proteins, transmembrane proteins or intracellular proteins. In one embodiment, the metastatic breast cancer or metastatic lung cancer protein is an intracellular protein. Intracellular proteins may be found in the cytoplasm and/or in the nucleus and/or in the organelles. Proteins containing one or more transmembrane domains that exclusively reside in organelles are also considered intracellular proteins. Intracellular proteins are involved in all aspects of cellular function and replication (including, e.g., signaling pathways); aberrant expression of such proteins often results in unregulated or disregulated cellular processes (see, e.g., Molecular Biology of the Cell (Alberts, ed., 3rd ed., 1994). For example, many intracellular proteins have enzymatic activity such as protein kinase activity, protein phosphatase activity, protease activity, nucleotide cyclase activity, polymerase activity and the like. Intracellular proteins also serve as docking proteins that are involved in organizing complexes of proteins, or targeting proteins to various subcellular localizations, and are involved in maintaining the structural integrity of organelles.

[0131] An increasingly appreciated concept in characterizing proteins is the presence in the proteins of one or more motifs for which defined functions have been attributed. In addition to the highly conserved sequences found in the enzymatic domain of proteins, highly conserved sequences have been identified in proteins that are involved in protein-protein interaction. For example, Src-homology-2 (SH2) domains bind tyrosine-phosphorylated targets in a sequence dependent manner. PTB domains, which are distinct from SH2 domains, also bind tyrosine phosphorylated targets. SH3 domains bind to proline-rich targets. In addition, PH domains, tetratricopeptide repeats and WD domains to name only a few, have been shown to mediate protein-protein interactions. Some of these may also be involved in binding to phospholipids or other second messengers. As will be appreciated by one of ordinary skill in the art, these motifs can be identified on the basis of primary sequence; thus, an analysis of the sequence of proteins may provide insight into both the enzymatic potential of the molecule and/or molecules with which the protein may associate. One useful database is Pfam (protein families), which is a large collection of multiple sequence alignments and hidden Markov models covering many common protein domains. Versions are available via the internet from Washington University in St. Louis, the Sanger Center in England, and the Karolinska Institute in Sweden (see, e.g., Bateman et al., Nuc. Acids Res. 28:263-266 (2000); Sonnhammer et al., Proteins 28:405-420 (1997); Bateman et al., Nuc. Acids Res. 27:260-262 (1999); and Sonnhammer et al., Nuc. Acids Res. 26:320-322-(1998)).

[0132] In another embodiment, the metastatic breast cancer or metastatic lung cancer sequences are transmembrane proteins. Transmembrane proteins are molecules that span a phospholipid bilayer of a cell. They may have an intracellular domain, an extracellular domain, or both. The intracellular domains of such proteins may have a number of functions including those already described for intracellular proteins. For example, the intracellular domain may have enzymatic activity and/or may serve as a binding site for additional proteins. Frequently the intracellular domain of transmembrane proteins serves both roles. For example certain receptor tyrosine kinases have both protein kinase activity and SH2 domains. In addition, autophosphorylation of tyrosines on the receptor molecule itself, creates binding sites for additional SH2 domain containing proteins.

[0133] Transmembrane proteins may contain from one to many transmembrane domains. For example, receptor tyrosine kinases, certain cytokine receptors, receptor guanylyl cyclases and receptor serine/threonine protein kinases contain a single transmembrane domain. However, various other proteins including channels, pumps, and adenylyl cyclases contain numerous transmembrane domains. Many important cell surface receptors such as G protein coupled receptors (GPCRs) are classified as “seven transmembrane domain” proteins, as they contain 7 membrane spanning regions. Characteristics of transmembrane domains include approximately 20 consecutive hydrophobic amino acids that may be followed by charged amino acids. Therefore, upon analysis of the amino acid sequence of a particular protein, the localization and number of transmembrane domains within the protein may be predicted (see, e.g. PSORT web site).

[0134] The extracellular domains of transmembrane proteins are diverse; however, conserved motifs are found repeatedly among various extracellular domains. Conserved structure and/or functions have been ascribed to different extracellular motifs. Many extracellular domains are involved in binding to other molecules. In one aspect, extracellular domains are found on receptors. Factors that bind the receptor domain include circulating ligands, which may be peptides, proteins, or small molecules such as adenosine and the like. For example, growth factors such as EGF, FGF and PDGF are circulating growth factors that bind to their cognate receptors to initiate a variety of cellular responses. Other factors include cytokines, mitogenic factors, hormones, neurotrophic factors and the like. Extracellular domains also bind to cell-associated molecules. In this respect, they mediate cell-cell interactions. Cell-associated ligands can be tethered to the cell, e.g., via a glycosylphosphatidylinositol (GPI) anchor, or may themselves be transmembrane proteins. Extracellular domains also associate with the extracellular matrix and contribute to the maintenance of the cell structure.

[0135] Metastatic breast cancer or metastatic lung cancer proteins that are transmembrane are particularly preferred in the present invention as they are readily accessible targets for extracellular immunotherapeutics, as are described herein. In addition, as outlined below, transmembrane proteins can be also useful in imaging modalities. Antibodies may be used to label such readily accessible proteins in situ or in histological analysis. Alternatively, antibodies can also label intracellular proteins, in which case analytical samples are typically permeablized to provide access to intracellular proteins.

[0136] It will also be appreciated by those in the art that a transmembrane protein can be made soluble by removing transmembrane sequences, e.g., through recombinant methods. Furthermore, transmembrane proteins that have been made soluble can be made to be secreted through recombinant means by adding an appropriate signal sequence.

[0137] In another embodiment, the metastatic breast cancer or metastatic lung cancer proteins are secreted proteins; the secretion of which can be either constitutive or regulated. These proteins have a signal peptide or signal sequence that targets the molecule to the secretory pathway. Secreted proteins are involved in numerous physiological events; by virtue of their circulating nature, they often serve to transmit signals to various other cell types. The secreted protein may function in an autocrine manner (acting on the cell that secreted the factor), a paracrine manner (acting on cells in close proximity to the cell that secreted the factor) or an endocrine manner (acting on cells at a distance). Thus secreted molecules find use in modulating or altering numerous aspects of physiology. Metastatic breast cancer or metastatic lung cancer proteins that are secreted proteins are particularly preferred in the present invention as they serve as good targets for diagnostic markers, e.g., for blood, plasma, serum, or stool tests.

### Use of metastatic Breast Cancer or Metastatic Lung Cancer Nucleic Acids

[0138] As described above, metastatic breast cancer or metastatic lung cancer sequence is initially identified by substantial nucleic acid and/or amino acid sequence homology or linkage to the metastatic breast cancer or metastatic lung cancer sequences outlined herein. Such homology can be based upon the overall nucleic acid or amino acid sequence, and is generally determined as outlined below, using either homology programs or hybridization conditions. Typically, linked sequences on a mRNA are found on the same molecule.

[0139] The metastatic breast cancer or metastatic lung cancer nucleic acid sequences of the invention, e.g., the sequences in Tables 1-12, can be fragments of larger genes, i.e., they are nucleic acid segments. “Genes” in this context includes coding regions, non-coding regions, and mixtures of coding and non-coding regions. Accordingly, as will be appreciated by those in the art, using the sequences provided herein, extended sequences, in either direction, of the metastatic breast cancer or metastatic lung cancer genes can be obtained, using techniques well known in the art for cloning either longer sequences or the full length sequences; see Ausubel, et al., supra. Much can be done by informatics and many sequences can be clustered to include multiple sequences corresponding to a single gene, e.g., systems such as UniGene.

[0140] Once the metastatic breast cancer or metastatic lung cancer nucleic acid is identified, it can be cloned and, if necessary, its constituent parts recombined to form the entire metastatic breast cancer or metastatic lung cancer nucleic acid coding regions or the entire mRNA sequence. Once isolated from its natural source, e.g., contained within a plasmid or other vector or excised therefrom as a linear nucleic acid segment, the recombinant metastatic breast cancer or metastatic lung cancer nucleic acid can be further-used as a probe to identify and isolate other metastatic breast cancer or metastatic lung cancer nucleic acids, e.g., extended coding regions. It can also be used as a “precursor” nucleic acid to make modified or variant metastatic breast cancer or metastatic lung cancer nucleic acids and proteins.

[0141] The metastatic breast cancer or metastatic lung cancer nucleic acids of the present invention are used in several ways. In a first embodiment, nucleic acid probes to the metastatic breast cancer or metastatic lung cancer nucleic acids are made and attached to biochips to be used in screening and diagnostic methods, as outlined below, or for administration, e.g., for gene therapy, vaccine, and/or antisense applications. Alternatively, the metastatic breast cancer or metastatic lung cancer nucleic acids that include coding regions of metastatic breast cancer or metastatic lung cancer proteins can be put into expression vectors for the expression of metastatic breast cancer or metastatic lung cancer proteins, again for screening purposes or for administration to a patient.

[0142] In a preferred embodiment, nucleic acid probes to metastatic breast cancer or metastatic lung cancer nucleic acids (both the nucleic acid sequences outlined in the figures and/or the complements thereof) are made. The nucleic acid probes attached to the biochip are designed to be substantially complementary to the metastatic breast cancer or metastatic lung cancer nucleic acids, i.e. the target sequence (either the target sequence of the sample or to other probe sequences, e.g., in sandwich assays), such that hybridization of the target sequence and the probes of the present invention occurs. As outlined below, this complementarity need not be perfect; there may be any number of base pair mismatches which will interfere with hybridization between the target sequence and the single stranded nucleic acids of the present invention. However, if the number of mutations is so great that no hybridization can occur under even the least stringent of hybridization conditions, the sequence is not a complementary target sequence. Thus, by “substantially complementary” herein is meant that the probes are sufficiently complementary to the target sequences to hybridize under appropriate reaction conditions, particularly high stringency conditions, as outlined herein.

[0143] A nucleic acid probe is generally single stranded but can be partially single and partially double stranded. The strandedness of the probe is dictated by the structure, composition, and properties of the target sequence. In general, the nucleic acid probes range from about 8 to about 100 bases long, with from about 10 to about 80 bases being preferred, and from about 30 to about 50 bases being particularly preferred. That is, generally complements of ORFs or whole genes are not used. In some embodiments, nucleic acids of lengths up to hundreds of bases can be used.

[0144] In a preferred embodiment, more than one probe per sequence is used, with either overlapping probes or probes to different sections of the target being used. That is, two, three, four or more probes, with three being preferred, are used to build in a redundancy for a particular target. The probes can be overlapping (i.e., have some sequence in common), or separate. In some cases, PCR primers may be used to amplify signal for higher sensitivity.

[0145] As will be appreciated by those in the art, nucleic acids can be attached or immobilized to a solid support in a wide variety of ways. By “immobilized” and grammatical equivalents herein is meant the association or binding between the nucleic acid probe and the solid support is sufficient to be stable under the conditions of binding, washing, analysis, and removal as outlined below. The binding can typically be covalent or non-covalent. By “non-covalent binding” and grammatical equivalents herein is typically meant one or more of electrostatic, hydrophilic, and hydrophobic interactions. Included in non-covalent binding is the covalent attachment of a molecule, such as, streptavidin to the support and the non-covalent binding of the biotinylated probe to the streptavidin. By “covalent binding” and grammatical equivalents herein is meant that the two moieties, the solid support and the probe, are attached by at least one bond, including sigma bonds, pi bonds and coordination bonds. Covalent bonds can be formed directly between the probe and the solid support or can be formed by a cross linker or by inclusion of a specific reactive group on either the solid support or the probe or both molecules. Immobilization may also involve a combination of covalent and non-covalent interactions.

[0146] In general, the probes are attached to a biochip in a wide variety of ways, as will be appreciated by those in the art. As described herein, the nucleic acids can either be synthesized first, with subsequent attachment to the biochip, or can be directly synthesized on the biochip.

[0147] The biochip comprises a suitable solid substrate. By “substrate” or “solid support” or other grammatical equivalents herein is meant a material that can be modified to contain discrete individual sites appropriate for the attachment or association of the nucleic acid probes and is amenable to at least one detection method. As will be appreciated by those in the art, the number of possible substrates are very large, and include, but are not limited to, glass and modified or functionalized glass, plastics (including acrylics, polystyrene and copolymers of styrene and other materials, polypropylene, polyethylene, polybutylene, polyurethanes, Teflon, etc.), polysaccharides, nylon or nitrocellulose, resins, silica or silica-based materials including silicon and modified silicon, carbon, metals, inorganic glasses, plastics, etc. In general, the substrates allow optical detection and do not appreciably fluoresce. A preferred substrate is described in copending application entitled Reusable Low Fluorescent Plastic Biochip, U.S. application Ser. No. 09/270,214, filed Mar. 15, 1999, herein incorporated by reference in its entirety.

[0148] Generally the substrate is planar, although as will be appreciated by those in the art, other configurations of substrates may be used as well. For example, the probes may be placed on the inside surface of a tube, for flow-through sample analysis to minimize sample volume. Similarly, the substrate may be flexible, such as a flexible foam, including closed cell foams made of particular plastics.

[0149] In a preferred embodiment, the surface of the biochip and the probe may be derivatized with chemical functional groups for subsequent attachment of the two. Thus, e.g., the biochip is derivatized with a chemical functional group including, but not limited to, amino groups, carboxy groups, oxo groups and thiol groups, with amino groups being particularly preferred. Using these functional groups, the probes can be attached using functional groups on the probes. For example, nucleic acids containing amino groups can be attached to surfaces comprising amino groups, e.g., using linkers as are known in the art; e.g., homo-or hetero-bifunctional linkers as are well known (see 1994 Pierce Chemical Company catalog, technical section on cross-linkers, pages 155-200). In addition, in some cases, additional linkers, such as alkyl groups (including substituted and heteroalkyl groups) may be used.

[0150] In this embodiment, oligonucleotides are synthesized as is known in the art, and then attached to the surface of the solid support. As will be appreciated by those skilled in the art, either the 5′ or 3′ terminus may be attached to the solid support, or attachment may be via an internal nucleoside.

[0151] In another embodiment, the immobilization to the solid support may be very strong, yet non-covalent. For example, biotinylated oligonucleotides can be made, which bind to surfaces covalently coated with streptavidin, resulting in attachment.

[0152] Alternatively, the oligonucleotides may be synthesized on the surface, as is known in the art. For example, photoactivation techniques utilizing photopolymerization compounds and techniques are used. In a preferred embodiment, the nucleic acids can be synthesized in situ, using well known photolithographic techniques, such as those described in WO 95/25116; WO 95/35505; U.S. Pat. Nos. 5,700,637 and 5,445,934; and references cited within, all of which are expressly incorporated by reference; these methods of attachment form the basis of the GENECHIP® (DNA microarray) technology from Affymetrix, Inc. (Santa Clara, Calif.).

[0153] Often, amplification-based assays are performed to measure the expression level of metastatic breast cancer or metastatic lung cancer-associated sequences. These assays are typically performed in conjunction with reverse transcription. In such assays, a metastatic breast cancer or metastatic lung cancer-associated nucleic acid sequence acts as a template in an amplification reaction (e.g., Polymerase Chain Reaction, or PCR). In a quantitative amplification, the amount of amplification product will be proportional to the amount of template in the original sample. Comparison to appropriate controls provides a measure of the amount of metastatic breast cancer or metastatic lung cancer-associated RNA. Methods of quantitative amplification are well known to those of skill in the art. Detailed protocols for quantitative PCR are provided, e.g., in Innis et al., PCR Protocols, A Guide to Methods and Applications (1990).

[0154] In some embodiments, a TAQMAN® (PCR reagent kit) based assay is used to measure expression. TAQMAN® (PCR reagent kit) based assays use a fluorogenic oligonucleotide probe that contains a 5′ fluorescent dye and a 3′ quenching agent. The probe hybridizes to a PCR product, but cannot itself be extended due to a blocking agent at the 3′ end. When the PCR product is amplified in subsequent cycles, the 5′ nuclease activity of the polymerase, e.g., AMPLITAQO (PCR enzyme reagent), results in the cleavage of the TAQMAN® (PCR reagent kit) probe. This cleavage separates the 5′ fluorescent dye and the 3′ quenching agent, thereby resulting in an increase in fluorescence as a function of amplification (see, e.g., literature provided by Perkin-Elmer, e.g., www2.perkin-elmer.com).

[0155] Other suitable amplification methods include, but are not limited to, ligase chain reaction (LCR) (see Wu & Wallace, Genomics 4:560 (1989), Landegren et al., Science 241:1077 (1988), and Barringer et al., Gene 89:117 (1990)), transcription amplification (Kwoh et al., Proc. Natl. Acad. Sci. USA 86:1173 (1989)), self-sustained sequence replication (Guatelli et al., Proc. Nat. Acad. Sci. USA 87:1874 (1990)), dot PCR, and linker adapter PCR, etc.

### Expression of Metastatic breast cancer or metastatic lung cancer proteins from nucleic acids

[0156] In a preferred embodiment, metastatic breast cancer or metastatic lung cancer nucleic acids, e.g., encoding metastatic breast cancer or metastatic lung cancer proteins, are used to make a variety of expression vectors to express metastatic breast cancer or metastatic lung cancer proteins which can then be used in screening assays, as described below. Expression vectors and recombinant DNA technology are well known to those of skill in the art (see, e.g., Ausubel, supra, and Gene Expression Systems (Fernandez & Hoeffler, eds, 1999)) and are used to express proteins. The expression vectors may be either self-replicating extrachromosomal vectors or vectors which integrate into a host genome. Generally, these expression vectors include transcriptional and translational regulatory nucleic acid operably linked to the nucleic acid encoding the metastatic breast cancer or metastatic lung cancer protein. The term “control sequences” refers to DNA sequences used for the expression of an operably linked coding sequence in a particular host organism. Control sequences that are suitable for prokaryotes, e.g., include a promoter, optionally an operator sequence, and a ribosome binding site. Eukaryotic cells are known to utilize promoters, polyadenylation signals, and enhancers.

[0157] Nucleic acid is “operably linked” when it is placed into a functional relationship with another nucleic acid sequence. For example, DNA for a presequence or secretory leader is operably linked to DNA for a polypeptide if it is expressed as a preprotein that participates in the secretion of the polypeptide; a promoter or enhancer is operably linked to a coding sequence if it affects the transcription of the sequence; or a ribosome binding site is operably linked to a coding sequence if it is positioned so as to facilitate translation. Generally, “operably linked” means that the DNA sequences being linked are contiguous, and, in the case of a secretory leader, contiguous and in reading phase. However, enhancers do not have to be contiguous. Linking is typically accomplished by ligation at convenient restriction sites. If such sites do not exist, synthetic oligonucleotide adaptors or linkers are used in accordance with conventional practice. Transcriptional and translational regulatory nucleic acid will generally be appropriate to the host cell used to express the metastatic breast cancer or metastatic lung cancer protein. Numerous types of appropriate expression vectors, and suitable regulatory sequences are known in the art for a variety of host cells.

[0158] In general, transcriptional and translational regulatory sequences may include, but are not limited to, promoter sequences, ribosomal binding sites, transcriptional start and stop sequences, translational start and stop sequences, and enhancer or activator sequences. In a preferred embodiment, the regulatory sequences include a promoter and transcriptional start and stop sequences.

[0159] Promoter sequences encode either constitutive or inducible promoters. The promoters may be either naturally occurring promoters or hybrid promoters. Hybrid promoters, which combine elements of more than one promoter, are also known in the art, and are useful in the present invention.

[0160] In addition, an expression vector may comprise additional elements. For example, the expression vector may have two replication systems, thus allowing it to be maintained in two organisms, e.g., in mammalian or insect cells for expression and in a procaryotic host for cloning and amplification. Furthermore, for integrating expression vectors, the expression vector contains at least one sequence homologous to the host cell genome, and preferably two homologous sequences which flank the expression construct. The integrating vector may be directed to a specific locus in the host cell by selecting the appropriate homologous sequence for inclusion in the vector. Constructs for integrating vectors are well known in the art (e.g., Fernandez & Hoeffler, supra).

[0161] In addition, in a preferred embodiment, the expression vector contains a selectable marker gene to allow the selection of transformed host cells. Selection genes are well known in the art and will vary with the host cell used.

[0162] The metastatic breast cancer or metastatic lung cancer proteins of the present invention are produced by culturing a host cell transformed with an expression vector containing nucleic acid encoding a metastatic breast cancer or metastatic lung cancer protein, under the appropriate conditions to induce or cause expression of the metastatic breast cancer or metastatic lung cancer protein. Conditions appropriate for metastatic breast cancer or metastatic lung cancer protein expression will vary with the choice of the expression vector and the host cell, and will be easily ascertained by one skilled in the art through routine experimentation or optimization. For example, the use of constitutive promoters in the expression vector will require optimizing the growth and proliferation of the host cell, while the use of an inducible promoter requires the appropriate growth conditions for induction. In addition, in some embodiments, the timing of the harvest is important. For example, the baculoviral systems used in insect cell expression are lytic viruses, and thus harvest time selection can be crucial for product yield.

[0163] Appropriate host cells include yeast, bacteria, archaebacteria, fungi, and insect and animal cells, including mammalian cells. Of particular interest are Saccharomyces cerevisiae and other yeasts, E. coli, Bacillus subtilis, Sf9 cells, C129 cells, 293 cells, Neurospora, BHK, CHO, COS, HeLa cells, HUVEC (human umbilical vein endothelial cells), THPl cells (a macrophage cell line) and various other human cells and cell lines.

[0164] In a preferred embodiment, the metastatic breast cancer or metastatic lung cancer proteins are expressed in mammalian cells. Mammalian expression systems are also known in the art, and include retroviral and adenoviral systems. Of particular use as mammalian promoters are the promoters from mammalian viral genes, since the viral genes are often highly expressed and have a broad host range. Examples include the SV40 early promoter, mouse mammary tumor virus LTR promoter, adenovirus major late promoter, herpes simplex virus promoter, and the CMV promoter (see, e.g., Fernandez & Hoeffler, supra). Typically, transcription termination and polyadenylation sequences recognized by mammalian cells are regulatory regions located 3′ to the translation stop codon and thus, together with the promoter elements, flank the coding sequence. Examples of transcription terminator and polyadenylation signals include those derived form SV40.

[0165] The methods of introducing exogenous nucleic acid into mammalian hosts, as well as other hosts, is well known in the art, and will vary with the host cell used. Techniques include dextran-mediated transfection, calcium phosphate precipitation, polybrene mediated transfection, protoplast fusion, electroporation, viral infection, encapsulation of the polynucleotide(s) in liposomes, and direct microinjection of the DNA into nuclei.

[0166] In a preferred embodiment, metastatic breast cancer or metastatic lung cancer proteins are expressed in bacterial systems. Promoters from bacteriophage may also be used and are known in the art. In addition, synthetic promoters and hybrid promoters are also useful; e.g., the tac promoter is a hybrid of the trp and lac promoter sequences. Furthermore, a bacterial promoter can include naturally occurring promoters of non-bacterial origin that have the ability to bind bacterial RNA polymerase and initiate transcription. In addition to a functioning promoter sequence, an efficient ribosome binding site is desirable. The expression vector may also include a signal peptide sequence that provides for secretion of the metastatic breast cancer or metastatic lung cancer protein in bacteria. The protein is either secreted into the growth media (gram-positive bacteria) or into the periplasmic space, located between the inner and outer membrane of the cell (gram-negative bacteria). The bacterial expression vector may also include a selectable marker gene to allow for the selection of bacterial strains that have been transformed. Suitable selection genes include genes which render the bacteria resistant to drugs such as ampicillin, chloramphenicol, erythromycin, kanamycin, neomycin and tetracycline. Selectable markers also include biosynthetic genes, such as those in the histidine, tryptophan and leucine biosynthetic pathways. These components are assembled into expression vectors. Expression vectors for bacteria are well known in the art, and include vectors for Bacillus subtilis, E. coli, Streptococcus cremoris, and Streptococcus lividans, among others (e.g., Fernandez & Hoeffler, supra). The bacterial expression vectors are transformed into bacterial host cells using techniques well known in the art, such as calcium chloride treatment, electroporation, and others.

[0167] In one embodiment, metastatic breast cancer or metastatic lung cancer proteins are produced in insect cells. Expression vectors for the transformation of insect cells, and in particular, baculovirus-based expression vectors, are well known in the art.

[0168] In a preferred embodiment, metastatic breast cancer or metastatic lung cancer protein is produced in yeast cells. Yeast expression systems are well known in the art, and include expression vectors for Saccharomyces cerevisiae, Candida albicans and C. maltosa, Hansenula polymorpha, Kluyveromyces fragilis and K. lactis, Pichia guillerimondii and P. pastoris, Schizosaccharomyces pombe, and Yarrowia lipolytica.

[0169] The metastatic breast cancer or metastatic lung cancer protein may also be made as a fusion protein, using techniques well known in the art. Thus, e.g., for the creation of monoclonal antibodies, if the desired epitope is small, the metastatic breast cancer or metastatic lung cancer protein may be fused to a carrier protein to form an immunogen. Alternatively, the metastatic breast cancer or metastatic lung cancer protein may be made as a fusion protein to increase expression for affinity purification purposes, or for other reasons. For example, when the metastatic breast cancer or metastatic lung cancer protein is a metastatic breast cancer or metastatic lung cancer peptide, the nucleic acid encoding the peptide may be linked to other nucleic acid for expression purposes.

[0170] In a preferred embodiment, the metastatic breast cancer or metastatic lung cancer protein is purified or isolated after expression. Metastatic breast cancer or metastatic lung cancer proteins may be isolated or purified in a variety of appropriate ways. Standard purification methods include electrophoretic, molecular, immunological and chromatographic techniques, including ion exchange, hydrophobic, affinity, and reverse-phase HPLC chromatography, and chromatofocusing. For example, the metastatic breast cancer or metastatic lung cancer protein may be purified using a standard anti-metastatic breast cancer or metastatic lung cancer protein antibody colurn. Ultrafiltration and diafiltration techniques, in conjunction with protein concentration, are also useful. For general guidance in suitable purification techniques, see Scopes, Protein Purification (1982). The degree of purification necessary will vary depending on the use of the metastatic breast cancer or metastatic lung cancer protein. In some instances no purification will be necessary.

[0171] Once expressed and purified if necessary, the metastatic breast cancer or metastatic lung cancer proteins and nucleic acids are useful in a number of applications. They may be used as immunoselection reagents, as vaccine reagents, as screening agents, etc.

### Variants of metastatic breast cancer or metastatic lung cancer proteins

[0172] In one embodiment, the metastatic breast cancer or metastatic lung cancer proteins are derivative or variant metastatic breast cancer or metastatic lung cancer proteins as compared to the wild-type sequence. That is, as outlined more fully below, the derivative metastatic breast cancer or metastatic lung cancer peptide will often contain at least one amino acid substitution, deletion or insertion, with amino acid substitutions being particularly preferred. The amino acid substitution, insertion or deletion may occur at a particular residue within the metastatic breast cancer or metastatic lung cancer peptide.

[0173] Also included within one embodiment of metastatic breast cancer or metastatic lung cancer proteins of the present invention are amino acid sequence variants. These variants typically fall into one or more of three classes: substitutional, insertional or deletional variants. These variants ordinarily are prepared by site specific mutagenesis of nucleotides in the DNA encoding the metastatic breast cancer or metastatic lung cancer protein, using cassette or PCR mutagenesis or other techniques, to produce DNA encoding the variant, and thereafter expressing the DNA in recombinant cell culture as outlined above. However, variant metastatic breast cancer or metastatic lung cancer protein fragments having up to about 100-150 residues may be prepared by in vitro synthesis. Amino acid sequence variants are characterized by the predetermined nature of the variation, a feature that sets them apart from naturally occurring allelic or interspecies variation of the metastatic breast cancer or metastatic lung cancer protein amino acid sequence. The variants typically exhibit the same qualitative biological activity as the naturally occurring analogue, although variants can also be selected which have modified characteristics as will be more fully outlined below.

[0174] While the site or region for introducing an amino acid sequence variation is often predetermined, the mutation per se need not be predetermined. For example, in order to optimize the performance of a mutation at a given site, random mutagenesis may be conducted at the target codon or region and the expressed metastatic breast cancer or metastatic lung cancer variants screened for the optimal combination of desired activity. Techniques exist for making substitution mutations at predetermined sites in DNA having a known sequence, e.g., M13 primer mutagenesis and PCR mutagenesis. Screening of the mutants is done using assays of metastatic breast cancer or metastatic lung cancer protein activities.

[0175] Amino acid substitutions are typically of single residues; insertions usually will be on the order of from about 1 to 20 amino acids, although considerably larger insertions may be occasionally tolerated. Deletions range from about 1 to about 20 residues, although in some cases deletions may be much larger.

[0176] Substitutions, deletions, insertions or any combination thereof may be used to arrive at a final derivative. Generally these changes are done on a few amino acids to minimize the alteration of the molecule. Larger changes may be tolerated in certain circumstances. When small alterations in the characteristics of a metastatic breast cancer or metastatic lung cancer protein are desired, substitutions are generally made in accordance with the amino acid substitution chart provided in the definition section.

[0177] Variants typically exhibit the same qualitative biological activity and will elicit the same immune response as the naturally-occurring analog, although variants also are selected to modify the characteristics of the metastatic breast cancer or metastatic lung cancer proteins as needed. Alternatively, the variant may be designed or reorganized such that the biological activity of the metastatic breast cancer or metastatic lung cancer protein is altered. For example, glycosylation sites may be altered or removed.

[0178] Covalent modifications of metastatic breast cancer or metastatic lung cancer polypeptides are included within the scope of this invention. One type of covalent modification includes reacting targeted amino acid residues of a metastatic breast cancer or metastatic lung cancer polypeptide with an organic derivatizing agent that is capable of reacting with selected side chains or the N-or C-terminal residues of a metastatic breast cancer or metastatic lung cancer polypeptide. Derivatization with bifunctional agents is useful, for instance, for crosslinking metastatic breast cancer or metastatic lung cancer polypeptides to a water-insoluble support matrix or surface for use in the method for purifying anti-metastatic breast cancer or metastatic lung cancer polypeptide antibodies or screening assays, as is more fully described below. Commonly used crosslinking agents include, e.g., 1,1-bis(diazoacetyl)-2-phenylethane, glutaraldehyde, N-hydroxysuccinimide esters, e.g., esters with 4-azidosalicylic acid, homobifunctional imidoesters, including disuccinimidyl esters such as 3,3′-dithiobis(succinimidylpropionate), bifinctional maleimides such as bis-N-maleimido-1,8-octane and agents such as methyl-3-((p-azidophenyl)dithio)propioimidate.

[0179] Other modifications include deamidation of glutaminyl and asparaginyl residues to the corresponding glutamyl and aspartyl residues, respectively, hydroxylation of proline and lysine, phosphorylation of hydroxyl groups of seryl, threonyl or tyrosyl residues, methylation of the γ-amino groups of lysine, arginine, and histidine side chains (Creighton, Proteins: Structure and Molecular Properties, pp. 79-86 (1983)), acetylation of the N-terminal amine, and amidation of any C-terminal carboxyl group.

[0180] Another type of covalent modification of the metastatic breast cancer or metastatic lung cancer polypeptide encompassed by this invention is an altered native glycosylation pattern of the polypeptide. “Altering the native glycosylation pattern” is intended herein to mean adding to or deleting one or more carbohydrate moieties of a native sequence metastatic breast cancer or metastatic lung cancer polypeptide. Glycosylation patterns can be altered in many ways. For example the use of different cell types to express metastatic breast cancer or metastatic lung cancer-associated sequences can result in different glycosylation patterns.

[0181] Addition of glycosylation sites to metastatic breast cancer or metastatic lung cancer polypeptides may also be accomplished by altering the amino acid sequence thereof. The alteration may be made, e.g., by the addition of, or substitution by, one or more serine or threonine residues to the native sequence metastatic breast cancer or metastatic lung cancer polypeptide (for O-linked glycosylation sites). The metastatic breast cancer or metastatic lung cancer amino acid sequence may optionally be altered through changes at the DNA level, particularly by mutating the DNA encoding the metastatic breast cancer or metastatic lung cancer polypeptide at preselected bases such that codons are generated that will translate into the desired amino acids.

[0182] Another means of increasing the number of carbohydrate moieties on the metastatic breast cancer or metastatic lung cancer polypeptide is by chemical or enzymatic coupling of glycosides to the polypeptide. Such methods are described in the art, e.g., in WO 87/05330, and in Aplin & Wriston, CRC Crit. Rev. Biochem., pp. 259-306 (1981).

[0183] Removal of carbohydrate moieties present on the metastatic breast cancer or metastatic lung cancer polypeptide may be accomplished chemically or enzymatically or by mutational substitution of codons encoding for amino acid residues that serve as targets for glycosylation. Chemical deglycosylation techniques are known in the art and described, for instance, by Hakimuddin, et al., Arch. Biochem. Biophys., 259:52 (1987) and by Edge et al., Anal. Biochem., 118:131 (1981). Enzymatic cleavage of carbohydrate moieties on polypeptides can be achieved by the use of a variety of endo-and exo-glycosidases as described by Thotakura et al., Meth. Enzymol., 138:350 (1987).

[0184] Another type of covalent modification of metastatic breast cancer or metastatic lung cancer comprises linking the metastatic breast cancer or metastatic lung cancer polypeptide to one of a variety of nonproteinaceous polymers, e.g., polyethylene glycol, polypropylene glycol, or polyoxyalkylenes, in the manner set forth in U.S. Pat. Nos. 4,640,835; 4,496,689; 4,301,144; 4,670,417; 4,791,192 or 4,179,337, each of which is hereby incorporated by reference herein.

[0185] Metastatic breast cancer or metastatic lung cancer polypeptides of the present invention may also be modified in a way to form chimeric molecules comprising a metastatic breast cancer or metastatic lung cancer polypeptide fused to another, heterologous polypeptide or amino acid sequence. In one embodiment, such a chimeric molecule comprises a fusion of a metastatic breast cancer or metastatic lung cancer polypeptide with a tag polypeptide which provides an epitope to which an anti-tag antibody can selectively bind. The epitope tag is generally placed at the amino-or carboxyl-terminus of the metastatic breast cancer or metastatic lung cancer polypeptide. The presence of such epitope-tagged forms of a metastatic breast cancer or metastatic lung cancer polypeptide can be detected using an antibody against the tag polypeptide. Also, provision of the epitope tag enables the metastatic breast cancer or metastatic lung cancer polypeptide to be readily purified by affinity purification using an anti-tag antibody or another type of affinity matrix that binds to the epitope tag. In an alternative embodiment, the chimeric molecule may comprise a fusion of a metastatic breast cancer or metastatic lung cancer polypeptide with an immunoglobulin or a particular region of an immunoglobulin. For a bivalent form of the chimeric molecule, such a fusion could be to the Fc region of an IgG molecule.

[0186] Various tag polypeptides and their respective antibodies are well known and examples include poly-histidine (poly-his) or poly-histidine-glycine (poly-his-gly) tags; HIS6 and metal chelation tags, the flu HA tag polypeptide and its antibody 12CA5 (Field et al., Mol. Cell. Biol. 8:2159-2165 (1988)); the c-myc tag and the 8F9, 3C7, 6E10, G4, B7 and 9E10 antibodies thereto (Evan et al., Molecular and Cellular Biology 5:3610-3616 (1985)); and the Herpes Simplex virus glycoprotein D (gD) tag and its antibody (Paborsky et al., Protein Engineering 3(6):547-553 (1990)). Other tag polypeptides include the Flag-peptide (Hopp et al., BioTechnology 6:1204-1210 (1988)); the KT3 epitope peptide (Martin et al., Science 255:192-194 (1992)); tubulin epitope peptide (Skinner et al., J Biol. Chem. 266:15163-15166 (1991)); and the T7 gene 10 protein peptide tag (Lutz-Freyermuth et al., Proc. Natl. Acad. Sci. USA 87:6393-6397 (1990)).

[0187] Also included are other metastatic breast cancer or metastatic lung cancer proteins of the metastatic breast cancer or metastatic lung cancer family, and metastatic breast cancer or metastatic lung cancer proteins from other organisms, which are cloned and expressed as outlined below. Thus, probe or degenerate polymerase chain reaction (PCR) primer sequences may be used to find other related metastatic breast cancer or metastatic lung cancer proteins from primates or other organisms. As will be appreciated by those in the art, particularly useful probe and/or PCR primer sequences include unique areas of the metastatic breast cancer or metastatic lung cancer nucleic acid sequence. As is generally known in the art, preferred PCR primers are from about 15 to about 35 nucleotides in length, with from about 20 to about 30 being preferred, and may contain inosine as needed. PCR reaction conditions are well known in the art (e.g., Innis, PCR Protocols, supra).

### Antibodies to Metastatic Breast Cancer or Metastatic Lung Cancer Proteins

[0188] In a preferred embodiment, when a metastatic breast cancer or metastatic lung cancer protein is to be used to generate antibodies, e.g., for immunotherapy or immunodiagnosis, the metastatic breast cancer or metastatic lung cancer protein should share at least one epitope or determinant with the full length protein. By “epitope” or “determinant” herein is typically meant a portion of a protein which will generate and/or bind an antibody or T-cell receptor in the context of MHC. Thus, in most instances, antibodies made to a smaller metastatic breast cancer or metastatic lung cancer protein will be able to bind to the full-length protein, particularly linear epitopes. In a preferred embodiment, the epitope is unique; that is, antibodies generated to a unique epitope show little or no cross-reactivity.

[0189] Methods of preparing polyclonal antibodies are well known (e.g., Coligan, supra; and Harlow & Lane, supra). Polyclonal antibodies can be raised in a mammal, e.g., by one or more injections of an immunizing agent and, if desired, an adjuvant. Typically, the immunizing agent and/or adjuvant will be injected in the mammal by multiple subcutaneous or intraperitoneal injections. The immunizing agent may include a protein encoded by a nucleic acid of Tables 1-12 or fragment thereof or a fusion protein thereof. It may be useful to conjugate the immunizing agent to a protein known to be immunogenic in the mammal being immunized. Immunogenic proteins include, e.g., keyhole limpet hemocyanin, serum albumin, bovine thyroglobulin, and soybean trypsin inhibitor. Adjuvants include, e.g., Freund's complete adjuvant and MPL-TDM adjuvant (monophosphoryl Lipid A, synthetic trehalose dicorynomycolate). The immunization protocol may be selected by one skilled in the art.

[0190] The antibodies may, alternatively, be monoclonal antibodies. Monoclonal antibodies may be prepared using hybridoma methods, such as those described by Kohler & Milstein, Nature 256:495 (1975). In a hybridoma method, a mouse, hamster, or other appropriate host animal, is typically immunized with an immunizing agent to elicit lymphocytes that produce or are capable of producing antibodies that will specifically bind to the immunizing agent. Alternatively, the lymphocytes may be immunized in vitro. The immunizing agent will typically include a polypeptide encoded by a nucleic acid of Tables 1-12, or fragment thereof, or a fusion protein thereof. Generally, either peripheral blood lymphocytes (“PBLs”) are used if cells of human origin are desired, or spleen cells or lymph node cells are used if non-human mammalian sources are desired. The lymphocytes are then fused with an immortalized cell line using a suitable fusing agent, such as polyethylene glycol, to form a hybridoma cell (Goding, Monoclonal Antibodies: Principles and Practice, pp. 59-103 (1986)). Immortalized cell lines are usually transformed mammalian cells, particularly myeloma cells of rodent, bovine and primate origin. Usually, rat or mouse myeloma cell lines are employed. The hybridoma cells may be cultured in a suitable culture medium that preferably contains one or more substances that inhibit the growth or survival of the unfused, immortalized cells. For example, if the parental cells lack the enzyme hypoxanthine guanine phosphoribosyl transferase (HGPRT or HPRT), the culture medium for the hybridomas typically will include hypoxanthine, aminopterin, and thymidine (“HAT medium”), which substances prevent the growth of HGPRT-deficient cells.

[0191] In one embodiment, the antibodies are bispecific antibodies. Bispecific antibodies are typically monoclonal, preferably human or humanized, antibodies that have binding specificities for at least two different antigens or that have binding specificities for two epitopes on the same antigen. In one embodiment, one of the binding specificities is for a protein encoded by a nucleic acid of Tables 1-12 or a fragment thereof, the other one is for any other antigen, and preferably for a cell-surface protein or receptor or receptor subunit, preferably one that is tumor specific. Alternatively, tetramer-type technology may create multivalent reagents.

[0192] In a preferred embodiment, the antibodies to metastatic breast cancer or metastatic lung cancer protein are capable of reducing or eliminating a biological function of a metastatic breast cancer or metastatic lung cancer protein, as is described below. That is, the addition of anti-metastatic breast cancer or metastatic lung cancer protein antibodies (either polyclonal or preferably monoclonal) to metastatic breast cancer or metastatic lung cancer tissue (or cells containing metastatic breast cancer or metastatic lung cancer) may reduce or eliminate the metastatic breast cancer or metastatic lung cancer. Generally, at least a 25% decrease in activity, growth, size or the like is preferred, with at least about 50% being particularly preferred and about a 95-100% decrease being especially preferred.

[0193] In a preferred embodiment the antibodies to the metastatic breast cancer or metastatic lung cancer proteins are humanized antibodies (e.g., Xenerex Biosciences, Mederex, Inc., Abgenix, Inc., Protein Design Labs, Inc.) Humanized forms of non-human (e.g., murine) antibodies are chimeric molecules of immunoglobulins, immunoglobulin chains or fragments thereof (such as Fv, Fab, Fab′, F(ab′)2 or other antigen-binding subsequences of antibodies) which contain minimal sequence derived from non-human immunoglobulin. Humanized antibodies include human immunoglobulins (recipient antibody) in which residues from a complementary determining region (CDR) of the recipient are replaced by residues from a CDR of a non-human species (donor antibody) such as mouse, rat or rabbit having the desired specificity, affinity and capacity. In some instances, Fv framework residues of the human immunoglobulin are replaced by corresponding non- human residues. Humanized antibodies may also comprise residues which are found neither in the recipient antibody nor in the imported CDR or framework sequences. In general, a humanized antibody will comprise substantially all of at least one, and typically two, variable domains, in which all or substantially all of the CDR regions correspond to those of a non-human immunoglobulin and all or substantially all of the framework (FR) regions are those of a human immunoglobulin consensus sequence. The humanized antibody optimally also will comprise at least a portion of an immunoglobulin constant region (Fc), typically that of a human immunoglobulin (Jones et al., Nature 321:522-525 (1986); Riechmann et al., Nature 332:323-329 (1988);. and Presta, Curr. Op. Struct. Biol. 2:593-596 (1992)). Humanization can be essentially performed following the method of Winter and co-workers (Jones et al., Nature 321:522-525 (1986); Riechmann et al., Nature 332:323-327 (1988); Verhoeyen et al., Science 239:1534-1536 (1988)), by substituting rodent CDRs or CDR sequences for the corresponding sequences of a human antibody. Accordingly, such humanized antibodies are chimeric antibodies (U.S. Pat. No. 4,816,567, which is hereby incorporated by reference herein.), wherein substantially less than an intact human variable domain has been substituted by the corresponding sequence from a non-human species.

[0194] Human-like antibodies can also be produced using various techniques known in the art, including phage display libraries (Hoogenboom & Winter, J. Mol. Biol. 227:381 (1991); Marks et al., J. Mol. Biol. 222:581 (1991)). The techniques of Cole et al. and Boemer et al. are also available for the preparation of human monoclonal antibodies (Cole et al., Monoclonal Antibodies and Cancer Therapy, p. 77 (1985) and Boerner et al., J. Immunol. 147(1):86-95 (1991)). Similarly, human antibodies can be made by introducing of human immunoglobulin loci into transgenic animals, e.g., mice in which the endogenous immunoglobulin genes have been partially or completely inactivated. Upon challenge, human antibody production is observed, which closely resembles that seen in humans in virtually all respects, including gene rearrangement, assembly, and antibody repertoire. This approach is described, e.g., in U.S. Pat. Nos. 5,545,807; 5,545,806; 5,569,825; 5,625,126; 5,633,425; 5,661,016, each of which is hereby incorporated by reference herein, and in the following scientific publications: Marks et al., Bio/Technology 10:779-783 (1992); Lonberg et al., Nature 368:856-859 (1994); Morrison, Nature 368:812-13 (1994); Fishwild et al., Nature Biotechnology 14:845-51 (1996); Neuberger, Nature Biotechnology 14:826 (1996); Lonberg & Huszar, Intern. Rev. Immunol. 13:65-93 (1995).

[0195] By immunotherapy is meant treatment of metastatic breast cancer or metastatic lung cancer with an antibody raised against a metastatic breast cancer or metastatic lung cancer proteins. As used herein, immunotherapy can be passive or active. Passive immunotherapy as defined herein is the passive transfer of antibody to a recipient (patient). Active immunization is the induction of antibody and/or T-cell responses in a recipient (patient). Induction of an immune response is the result of providing the recipient with an antigen to which antibodies are raised. The antigen may be provided by injecting a polypeptide against which antibodies are desired to be raised into a recipient, or contacting the recipient with a nucleic acid capable of expressing the antigen and under conditions for expression of the antigen, leading to an immune response.

[0196] In a preferred embodiment the metastatic breast cancer or metastatic lung cancer proteins against which antibodies are raised are secreted proteins as described above. Without being bound by theory, antibodies used for treatment, bind and prevent the secreted protein from binding to its receptor, thereby inactivating the secreted metastatic breast cancer or metastatic lung cancer protein.

[0197] In another preferred embodiment, the metastatic breast cancer or metastatic lung cancer protein to which antibodies are raised is a transmembrane protein. Without being bound by theory, antibodies used for this treatment typically bind the extracellular domain of the metastatic breast cancer or metastatic lung cancer protein and prevent it from binding to other proteins, such as circulating ligands or cell-associated molecules. The antibody may cause down-regulation of the transmembrane metastatic breast cancer or metastatic lung cancer protein. The antibody may be a competitive, non-competitive or uncompetitive inhibitor of protein binding to the extracellular domain of the metastatic breast cancer or metastatic lung cancer protein. The antibody may be an antagonist of the metastatic breast cancer or metastatic lung cancer protein or may prevent activation of the transmembrane metastatic breast cancer or metastatic lung cancer protein. In some embodiments, when the antibody prevents the binding of other molecules to the metastatic breast cancer or metastatic lung cancer protein, the antibody prevents growth of the cell. The antibody may also be used to target or sensitize the cell to cytotoxic agents, including, but not limited to TNF-α, TNF-β, IL-1, INF-γ and IL-2, or chemotherapeutic agents including 5FU, vinblastine, actinomycin D, cisplatin, methotrexate, and the like. In some instances the antibody belongs to a sub-type that activates serum complement when complexed with the transmembrane protein thereby mediating cytotoxicity or antigen-dependent cytotoxicity (ADCC). Thus, metastatic breast cancer or metastatic lung cancer is treated by administering to a patient antibodies directed against the transmembrane metastatic breast cancer or metastatic lung cancer protein. Antibody-labeling may activate a co-toxin, localize a toxin payload, or otherwise provide means to locally ablate cells.

[0198] In another preferred embodiment, the antibody is conjugated to an effector moiety. The effector moiety can be any number of molecules, including labeling moieties such as radioactive labels or fluorescent labels, or can be a therapeutic moiety. In one aspect the therapeutic moiety is a small molecule that modulates the activity of the metastatic breast cancer or metastatic lung cancer protein. In another aspect the therapeutic moiety modulates the activity of molecules associated with or in close proximity to the metastatic breast cancer or metastatic lung cancer protein. The therapeutic moiety may inhibit enzymatic activity such as protease or collagenase activity associated with metastatic breast cancer or metastatic lung cancer.

[0199] In a preferred embodiment, the therapeutic moiety can also be a cytotoxic agent. In this method, targeting the cytotoxic agent to metastatic breast cancer or metastatic lung cancer tissue or cells. results in a reduction in the number of afflicted cells, thereby reducing symptoms associated with metastatic breast cancer or metastatic lung cancer. Cytotoxic agents are numerous and varied and include, but are not limited to, cytotoxic drugs or toxins or active fragments of such toxins. Suitable toxins and their corresponding fragments include diphtheria A chain, exotoxin A chain, ricin A chain, abrin A chain, curcin, crotin, phenomycin, enomycin and the like. Cytotoxic agents also include radiochemicals made by conjugating radioisotopes to antibodies raised against metastatic breast cancer or metastatic lung cancer proteins, or binding of a radionuclide to a chelating agent that has been covalently attached to the antibody. Targeting the therapeutic moiety to transmembrane metastatic breast cancer or metastatic lung cancer proteins not only serves to increase the local concentration of therapeutic moiety in the metastatic breast cancer or metastatic lung cancer afflicted area, but also serves to reduce deleterious side effects that may be associated with the therapeutic moiety.

[0200] In another preferred embodiment, the metastatic breast cancer or metastatic lung cancer protein against which the antibodies are raised is an intracellular protein. In this case, the antibody may be conjugated to a protein or other entity which facilitates entry into the cell. In one case, the antibody enters the cell by endocytosis. In another embodiment, a nucleic acid encoding the antibody is administered to the individual or cell. Moreover, wherein the metastatic breast cancer or metastatic lung cancer protein can be targeted within a cell, i.e., the nucleus, an antibody thereto contains a signal for that target localization, i.e., a nuclear localization signal.

[0201] The metastatic breast cancer or metastatic lung cancer antibodies of the invention specifically bind to metastatic breast cancer or metastatic lung cancer proteins. By “specifically bind” herein is meant that the antibodies bind to the protein with a K_{d} of at least about 0.1 mM, more usually at least about 1 μM, preferably at least about 0.1 μM or better, and most preferably, 0.01 μM or better. Selectivity of binding is also important.

### Detection of Metastatic Breast Cancer or Metastatic Lung Cancer Sequence for Diagnostic and Therapeutic Applications

[0202] In one aspect, the RNA expression levels of genes are determined for different cellular states in the metastatic breast cancer or metastatic lung cancer phenotype. Expression levels of genes in normal tissue (i.e., not undergoing metastatic breast cancer or metastatic lung cancer) and in metastatic breast cancer or metastatic lung cancer tissue (and in some cases, for varying severities of metastatic breast cancer or metastatic lung cancer that relate to prognosis, as outlined below) are evaluated to provide expression profiles. An expression profile of a particular cell state or point of development is essentially a “fingerprint” of the state. While two states may have any particular gene similarly expressed, the evaluation of a number of genes simultaneously allows the generation of a gene expression profile that is reflective of the state of the cell. By comparing expression profiles of cells in different states, information regarding which genes are important (including both up- and down-regulation of genes) in each of these states is obtained. Then, diagnosis may be performed or confirmed to determine whether a tissue sample has the gene expression profile of normal or cancerous tissue. This will provide for molecular diagnosis of related conditions.

[0203] “Differential expression,” or grammatical equivalents as used herein, refers to qualitative or quantitative differences in the temporal and/or cellular gene expression patterns within and among cells and tissue. Thus, a differentially expressed gene can qualitatively have its expression altered, including an activation or inactivation, in, e.g., normal versus metastatic breast cancer or metastatic lung cancer tissue. Genes may be turned on or turned off in a particular state, relative to another state thus permitting comparison of two or more states. A qualitatively regulated gene will exhibit an expression pattern within a state or cell type which is detectable by standard techniques. Some genes will be expressed in one state or cell type, but not in both. Alternatively, the difference in expression may be quantitative, e.g., in that expression is increased or decreased; i.e., gene expression is either upregulated, resulting in an increased amount of transcript, or downregulated, resulting in a decreased amount of transcript. The degree to which expression differs need only be large enough to quantify via standard characterization techniques as outlined below, such as by use of GENECHIP® (DNA microarray) expression arrays from Affymetrix, Inc. (Santa Clara, Calif.), as described in Lockhart et al., Nature Biotechnology 14:1675-1680 (1996), hereby expressly incorporated by reference. Other techniques include, but are not limited to, quantitative reverse transcriptase PCR, northern analysis and RNase protection. As outlined above, preferably the change in expression (i.e., upregulation or downregulation) is typically at least about 50%, more preferably at least about 100%, more preferably at least about 150%, more preferably at least about 200%, with from 300 to at least 1000% being especially preferred.

[0204] Evaluation may be at the gene transcript, or the protein level. The amount of gene expression may be monitored using nucleic acid probes to the DNA or RNA equivalent of the gene transcript, and the quantification of gene expression levels, or, alternatively, the final gene product itself (protein) can be monitored, e.g., with antibodies to the metastatic breast cancer or metastatic lung cancer protein and standard immunoassays (ELISAs, etc.) or other techniques, including mass spectroscopy assays, 2D gel electrophoresis assays, etc. Proteins corresponding to metastatic breast cancer or metastatic lung cancer genes, i.e., those identified as being important in a metastatic breast cancer or metastatic lung cancer phenotype, can be evaluated in a metastatic breast cancer or metastatic lung cancer diagnostic test.

[0205] In a preferred embodiment, gene expression monitoring is performed simultaneously on a number of genes.

[0206] The metastatic breast cancer or metastatic lung cancer nucleic acid probes may be attached to biochips as outlined herein for the detection and quantification of metastatic breast cancer or metastatic lung cancer sequences in a particular cell. The assays are further described below in the example. PCR techniques can be used to provide greater sensitivity. Multiple protein expression monitoring can be performed as well. Similarly, these assays may be performed on an individual basis as well.

[0207] In a preferred embodiment nucleic acids encoding the metastatic breast cancer or metastatic lung cancer protein are detected. Although DNA or RNA encoding the metastatic breast cancer or metastatic lung cancer protein may be detected, of particular interest are methods wherein an mRNA encoding a metastatic breast cancer or metastatic lung cancer protein is detected. Probes to detect mRNA can be a nucleotide/deoxynucleotide probe that is complementary to and hybridizes with the mRNA and includes, but is not limited to, oligonucleotides, cDNA or RNA. Probes also should contain a detectable label, as defined herein. In one method the mRNA is detected after immobilizing the nucleic acid to be examined on a solid support such as nylon membranes and hybridizing the probe with the sample. Following washing to remove the non-specifically bound probe, the label is detected. In another method detection of the mRNA is performed in situ. In this method permeabilized cells or tissue samples are contacted with a detectably labeled nucleic acid probe for sufficient time to allow the probe to hybridize with the target mRNA. Following washing to remove the non-specifically bound probe, the label is detected. For example a digoxygenin labeled riboprobe (RNA probe) that is complementary to the mRNA encoding a metastatic breast cancer or metastatic lung cancer protein is detected by binding the digoxygenin with an anti-digoxygenin secondary antibody and developed with nitro blue tetrazolium and 5-bromo-4-chloro-3-indoyl phosphate.

[0208] In a preferred embodiment, various proteins from the three classes of proteins as described herein (secreted, transmembrane or intracellular proteins) are used in diagnostic assays. The metastatic breast cancer or metastatic lung cancer proteins, antibodies, nucleic acids, modified proteins and cells containing metastatic breast cancer or metastatic lung cancer sequences are used in diagnostic assays. This can be performed on an individual gene or corresponding polypeptide level. In a preferred embodiment, the expression profiles are used, preferably in conjunction with high throughput screening techniques to allow monitoring for expression profile genes and/or corresponding polypeptides.

[0209] As described and defined herein, metastatic breast cancer or metastatic lung cancer proteins, including intracellular, transmembrane or secreted proteins, find use as markers of metastatic breast cancer or metastatic lung cancer. Detection of these proteins in putative metastatic breast cancer or metastatic lung cancer tissue allows for detection or diagnosis of metastatic breast cancer or metastatic lung cancer. In one embodiment, antibodies are used to detect metastatic breast cancer or metastatic lung cancer proteins. A preferred method separates proteins from a sample by electrophoresis on a gel (typically a denaturing and reducing protein gel, but may be another type of gel, including isoelectric focusing gels and the like). Following separation of proteins, the metastatic breast cancer or metastatic lung cancer protein is detected, e.g., by immunoblotting with antibodies raised against the metastatic breast cancer or metastatic lung cancer protein. Methods of immunoblotting are well known to those of ordinary skill in the art.

[0210] In another preferred method, antibodies to the metastatic breast cancer or metastatic lung cancer protein find use in in situ imaging techniques, e.g., in histology (e.g., Methods in Cell Biology: Antibodies in Cell Biology, volume 37 (Asai, ed. 1993)). In this method cells are contacted with from one to many antibodies to the metastatic breast cancer or metastatic lung cancer protein(s). Following washing to remove non-specific antibody binding, the presence of the antibody or antibodies is detected. In one embodiment the antibody is detected by incubating with a secondary antibody that contains a detectable label, e.g., multicolor fluorescence or confocal imaging. In another method the primary antibody to the metastatic breast cancer or metastatic lung cancer protein(s) contains a detectable label, e.g., an enzyme marker that can act on a substrate. In another preferred embodiment each one of multiple primary antibodies contains a distinct and detectable label. This method finds particular use in simultaneous screening for a plurality of metastatic breast cancer or metastatic lung cancer proteins. Many other histological imaging techniques are also provided by the invention.

[0211] In a preferred embodiment the label is detected in a fluorometer which has the ability to detect and distinguish emissions of different wavelengths. In addition, a fluorescence activated cell sorter (FACS) can be used in the method.

[0212] In another preferred embodiment, antibodies find use in diagnosing metastatic breast cancer or metastatic lung cancer from blood, serum, plasma, stool, and other samples. Such samples, therefore, are useful as samples to be probed or tested for the presence of metastatic breast cancer or metastatic lung cancer proteins. Antibodies can be used to detect a metastatic breast cancer or metastatic lung cancer protein by previously described immunoassay techniques including ELISA, immunoblotting (western blotting), immunoprecipitation, BIACORE technology and the like. Conversely, the presence of antibodies may indicate an immune response against an endogenous metastatic breast cancer or metastatic lung cancer protein or vaccine.

[0213] In a preferred embodiment, in situ hybridization of labeled metastatic breast cancer or metastatic lung cancer nucleic acid probes to tissue arrays is done. For example, arrays of tissue samples, including metastatic breast cancer or metastatic lung cancer tissue and/or normal tissue, are made. In situ hybridization (see, e.g., Ausubel, supra) is then performed. When comparing the fingerprints between an individual and a standard, the skilled artisan can make a diagnosis, a prognosis, or a prediction based on the findings. It is further understood that the genes which indicate the diagnosis may differ from those which indicate the prognosis and molecular profiling of the condition of the cells may lead to distinctions between responsive or refractory conditions or may be predictive of outcomes.

[0214] In a preferred embodiment, the metastatic breast cancer or metastatic lung cancer proteins, antibodies, nucleic acids, modified proteins and cells containing metastatic breast cancer or metastatic lung cancer sequences are used in prognosis assays. As above, gene expression profiles can be generated that correlate to metastatic breast cancer or metastatic lung cancer, in terms of long term prognosis. Again, this may be done on either a protein or gene level, with the use of genes being preferred. As above, metastatic breast cancer or metastatic lung cancer probes may be attached to biochips for the detection and quantification of metastatic breast cancer or metastatic lung cancer sequences in a tissue or patient. The assays proceed as outlined above for diagnosis. PCR method may provide more sensitive and accurate quantification.

### Assays for Therapeutic Compounds

[0215] In a preferred embodiment members of the three classes of proteins as described herein are used in drug screening assays. The metastatic breast cancer or metastatic lung cancer proteins, antibodies, nucleic acids, modified proteins and cells containing metastatic breast cancer or metastatic lung cancer sequences are used in drug screening assays or by evaluating the effect of drug candidates on a “gene expression profile” or expression profile of polypeptides. In a preferred embodiment, the expression profiles are used, preferably in conjunction with high throughput screening techniques to allow monitoring for expression profile genes after treatment with a candidate agent (e.g., Zlokarnik, et al., Science 279:84-8 (1998); Heid, Genome Res 6:986-94, 1996).

[0216] In a preferred embodiment, the metastatic breast cancer or metastatic lung cancer proteins, antibodies, nucleic acids, modified proteins and cells containing the native or modified metastatic breast cancer or metastatic lung cancer proteins are used in screening assays. That is, the present invention provides novel methods for screening for compositions which modulate the metastatic breast cancer or metastatic lung cancer phenotype or an identified physiological function of a metastatic breast cancer or metastatic lung cancer protein. As above, this can be done on an individual gene level or by evaluating the effect of drug candidates on a “gene expression profile”. In a preferred embodiment, the expression profiles are used, preferably in conjunction with high throughput screening techniques to allow monitoring for expression profile genes after treatment with a candidate agent, see Zlokamik, supra.

[0217] Having identified the differentially expressed genes herein, a variety of assays may be applied. In a preferred embodiment, assays may be run on an individual gene or protein level. That is, having identified a particular gene with altered regulation in metastatic breast cancer or metastatic lung cancer, test compounds can be screened for the ability to modulate gene expression or for binding to the metastatic breast cancer or metastatic lung cancer protein. “Modulation” thus includes an increase or a decrease in gene expression. The preferred amount of modulation will depend on the original change of the gene expression in normal versus tissue undergoing metastatic breast cancer or metastatic lung cancer, with changes of at least 10%, preferably 50%, more preferably 100-300%, and in some embodiments 300-1000% or greater. Thus, if a gene exhibits a 4-fold increase in metastatic breast cancer or metastatic lung cancer tissue compared to normal tissue, a decrease of about four-fold is often desired; similarly, a 10-fold decrease in metastatic breast cancer or metastatic lung cancer tissue compared to normal tissue often provides a target value of a 10-fold increase in expression to be induced by the test compound.

[0218] The amount of gene expression may be monitored using nucleic acid probes and the quantification of gene expression levels, or, alternatively, the gene product itself can be monitored, e.g., through the use of antibodies to the metastatic breast cancer or metastatic lung cancer protein and standard immunoassays. Proteomics and separation techniques may also allow quantification of expression.

[0219] In a preferred embodiment, gene or protein expression monitoring of a number of entities, i.e., an expression profile, is monitored simultaneously. Such profiles will typically involve a plurality of those entities described herein.

[0220] In this embodiment, the metastatic breast cancer or metastatic lung cancer nucleic acid probes are attached to biochips as outlined herein for the detection and quantification of metastatic breast cancer or metastatic lung cancer sequences in a particular cell. Alternatively, PCR may be used. Thus, a series, e.g., of microtiter plate, may be used with dispensed primers in desired wells. A PCR reaction can then be performed and analyzed for each well.

[0221] Expression monitoring can be performed to identify compounds that modify the expression of one or more metastatic breast cancer or metastatic lung cancer-associated sequences, e.g., a polynucleotide sequence set out in Tables 1-12. Generally, in a preferred embodiment, a test compound is added to the cells prior to analysis. Moreover, screens are also provided to identify agents that modulate metastatic breast cancer or metastatic lung cancer, modulate metastatic breast cancer or metastatic lung cancer proteins, bind to a metastatic breast cancer or metastatic lung cancer protein, or interfere with the binding of a metastatic breast cancer or metastatic lung cancer protein and an antibody, substrate, or other binding partner.

[0222] The term “test compound” or “drug candidate” or “modulator” or grammatical equivalents as used herein describes any molecule, e.g., protein, oligopeptide, small organic molecule, polysaccharide, polynucleotide, etc., to be tested for the capacity to directly or indirectly alter the metastatic breast cancer or metastatic lung cancer phenotype or the expression of a metastatic breast cancer or metastatic lung cancer sequence, e.g., a nucleic acid or protein sequence. In preferred embodiments, modulators alter expression profiles of nucleic acids or proteins provided herein. In one embodiment, the modulator suppresses a metastatic breast cancer or metastatic lung cancer phenotype, e.g., to a normal tissue fingerprint. In another embodiment, a modulator induces a metastatic breast cancer or metastatic lung cancer phenotype. Generally, a plurality of assay mixtures are run in parallel with different agent concentrations to obtain a differential response to the various concentrations. Typically, one of these concentrations serves as a negative control, i.e., at zero concentration or below the level of detection.

[0223] In one aspect, a modulator will neutralize the effect of a metastatic breast cancer or metastatic lung cancer protein. By “neutralize” is meant that activity of a protein and the consequent effect on the cell is inhibited or blocked.

[0224] In certain embodiments, combinatorial libraries of potential modulators will be screened for an ability to bind to a metastatic breast cancer or metastatic lung cancer polypeptide or to modulate activity. Conventionally, new chemical entities with useful properties are generated by identifying a chemical compound (called a “lead compound”) with some desirable property or activity, e.g., inhibiting activity, creating variants of the lead compound, and evaluating the property and activity of those variant compounds. Often, high throughput screening (HTS) methods are employed for such an analysis.

[0225] In one preferred embodiment, high throughput screening methods involve providing a library containing a large number of potential therapeutic compounds (candidate compounds). Such “combinatorial chemical libraries” are then screened in one or more assays to identify those library members (particular chemical species or subclasses) that display a desired characteristic activity. The compounds thus identified can serve as conventional “lead compounds” or can themselves be used as potential or actual therapeutics.

[0226] A combinatorial chemical library is a collection of diverse chemical compounds generated by either chemical synthesis or biological synthesis by combining a number of chemical “building blocks” such as reagents. For example, a linear combinatorial chemical library, such as a polypeptide (e.g., mutein) library, is formed by combining a set of chemical building blocks called amino acids in every possible way for a given compound length (i.e., the number of amino acids in a polypeptide compound). Millions of chemical compounds can be synthesized through such combinatorial mixing of chemical building blocks (Gallop et al., J. Med. Chem. 37(9):1233-1251 (1994)).

[0227] Preparation and screening of combinatorial chemical libraries is well known to those of skill in the art. Such combinatorial chemical libraries include, but are not limited to, peptide libraries (see, e.g., U.S. Pat. No. 5,010,175, Furka, Pept. Prot. Res. 37:487-493 (1991), Houghton et al., Nature, 354:84-88 (1991)), peptoids (PCT Publication No WO 91/19735), encoded peptides (PCT Publication WO 93/20242), random bio-oligomers (PCT Publication WO 92/00091), benzodiazepines (U.S. Pat. No. 5,288,514, which is hereby incorporated by reference herein), diversomers such as hydantoins, benzodiazepines and dipeptides (Hobbs et al., Proc. Nat. Acad. Sci. USA 90:6909-6913 (1993)), vinylogous polypeptides (Hagihara et al., J. Amer. Chem. Soc. 114:6568 (1992)), nonpeptidal peptidomimetics with a Beta-D-Glucose scaffolding (Hirschmann et al., J. Amer. Chem. Soc. 114:9217-9218 (1992)), analogous organic syntheses of small compound libraries (Chen et al., J. Amer. Chem. Soc. 116:2661 (1994)), oligocarbamates (Cho, et al., Science 261:1303 (1993)), and/or peptidyl phosphonates (Campbell et al., J. Org. Chem. 59:658 (1994)). See, generally, Gordon et al., J. Med. Chem. 37:1385 (1994), nucleic acid libraries (see, e.g., Strategene, Corp.), peptide nucleic acid libraries (see, e.g., U.S. Pat. No. 5,539,083, which is hereby incorporated by reference herein), antibody libraries (see, e.g., Vaughn et al., Nature Biotechnology 14(3):309-314 (1996), and PCT/US96/10287), carbohydrate libraries (see, e.g., Liang et al., Science 274:1520-1522 (1996), and U.S. Pat. No. 5,593,853, which is hereby incorporated by reference herein), and small organic molecule libraries (see, e.g., benzodiazepines, Baum, C&EN, Jan 18, page 33 (1993); isoprenoids, U.S. Pat. No. 5,569,588; thiazolidinones and metathiazanones, U.S. Pat. No. 5,549,974; pyrrolidines, U.S. Pat. Nos. 5,525,735 and 5,519,134; morpholino compounds, U.S. Pat. No. 5,506,337; benzodiazepines, U.S. Pat. No. 5,288,514; and the like, each of which is hereby incorporated by reference herein).

[0228] Devices for the preparation of combinatorial libraries are commercially available (see, e.g., 357 MPS, 390 MPS, Advanced Chem Tech, Louisville Ky., Symphony, Rainin, Woburn, Mass., 433A Applied Biosystems, Foster City, Calif., 9050 Plus, Millipore, Bedford, Mass.).

[0229] A number of well known robotic systems have also been developed for solution phase chemistries. These systems include automated workstations like the automated synthesis apparatus developed by Takeda Chemical Industries, LTD. (Osaka, Japan) and many robotic systems utilizing robotic arms (Zymate II, Zymark Corporation, Hopkinton, Mass.; Orca, Hewlett-Packard, Palo Alto, Calif.), which mimic the manual synthetic operations performed by a chemist. The above devices, with appropriate modification, are suitable for use with the present invention. In addition, numerous combinatorial libraries are themselves commercially available (see, e.g., ComGenex, Princeton, N.J.; Asinex, Moscow, RU; Tripos, Inc., St. Louis, Mo.; ChemStar, Ltd, Moscow, RU; 3D Pharmaceuticals, Exton, Pa.; Martek Biosciences, Columbia, Md., etc.).

[0230] The assays to identify modulators are amenable to high throughput screening. Preferred assays thus detect modulation of metastatic breast cancer or metastatic lung cancer gene transcription, polypeptide expression, and polypeptide activity.

[0231] High throughput assays for evaluating the presence, absence, quantification, or other properties of particular nucleic acids or protein products are well known to those of skill in the art. Similarly, binding assays and reporter gene assays are similarly well known. Thus, e.g., U.S. Pat. No. 5,559,410 discloses high throughput screening methods for proteins, U.S. Pat. No. 5,585,639 discloses high throughput screening methods for nucleic acid binding (i.e., in arrays), while U.S. Pat. Nos. 5,576,220 and 5,541,061 disclose high throughput methods of screening for ligand/antibody binding. Each of the above-cited patents is hereby incorporated by reference herein.

[0232] In addition, high throughput screening systems are commercially available (see, e.g., Zymark Corp., Hopkinton, Mass.; Air Technical Industries, Mentor, Ohio; Beckman Instruments, Inc. Fullerton, Calif.; Precision Systems, Inc., Natick, Mass., etc.). These systems typically automate procedures, including sample and reagent pipetting, liquid dispensing, timed incubations, and final readings of the microplate in detector(s) appropriate for the assay. These configurable systems provide high throughput and rapid start up as well as a high degree of flexibility and customization. The manufacturers of such systems provide detailed protocols for various high throughput systems. Thus, e.g., Zymark Corp. provides technical bulletins describing screening systems for detecting the modulation of gene transcription, ligand binding, and the like.

[0233] In one embodiment, modulators are proteins, often naturally occurring proteins or fragments of naturally occurring proteins. Thus, e.g., cellular extracts containing proteins, or random or directed digests of proteinaceous cellular extracts, may be used. In this way libraries of proteins may be made for screening in the methods of the invention. Particularly preferred in this embodiment are libraries of bacterial, fungal, viral, and mammalian proteins, with the latter being preferred, and human proteins being especially preferred. Particularly useful test compound will be directed to the class of proteins to which the target belongs, e.g., substrates for enzymes or ligands and receptors.

[0234] In a preferred embodiment, modulators are peptides of from about 5 to about 30 amino acids, with from about 5 to about 20 amino acids being preferred, and from about 7 to about 15 being particularly preferred. The peptides may be digests of naturally occurring proteins as is outlined above, random peptides, or “biased” random peptides. By “randomized” or grammatical equivalents herein is meant that the nucleic acid or peptide consists of essentially random sequences of nucleotides and amino acids, respectively. Since these random peptides (or nucleic acids, discussed below) are often chemically synthesized, they may incorporate any nucleotide or amino acid at any position. The synthetic process can be designed to generate randomized proteins or nucleic acids, to allow the formation of all or most of the possible combinations over the length of the sequence, thus forming a library of randomized candidate bioactive proteinaceous agents.

[0235] In one embodiment, the library is fully randomized, with no sequence preferences or constants at any position. In a preferred embodiment, the library is biased. That is, some positions within the sequence are either held constant, or are selected from a limited number of possibilities. In a preferred embodiment, the nucleotides or amino acid residues are randomized within a defined class, e.g., of hydrophobic amino acids, hydrophilic residues, sterically biased (either small or large) residues, towards the creation of nucleic acid binding domains, the creation of cysteines, for cross-linking, prolines for SH-3 domains, serines, threonines, tyrosines or histidines for phosphorylation sites, etc.

[0236] Modulators of metastatic breast cancer or metastatic lung cancer can also be nucleic acids, as defined above.

[0237] As described above generally for proteins, nucleic acid modulating agents may be naturally occurring nucleic acids, random nucleic acids, or “biased” random nucleic acids. Digests of procaryotic or eucaryotic genomes may be used as is outlined above for proteins.

[0238] In a preferred embodiment, the candidate compounds are organic chemical moieties, a wide variety of which are available in the literature.

[0239] After a candidate agent has been added and the cells allowed to incubate for some period of time, the sample containing a target sequence is analyzed. If required, the target sequence is prepared using known techniques. For example, the sample may be treated to lyse the cells, using known lysis buffers, electroporation, etc., with purification and/or amplification such as PCR performed as appropriate. For example, an in vitro transcription with labels covalently attached to the nucleotides is performed. Generally, the nucleic acids are labeled with biotin-FITC or PE, or with Cy-3 or Cy-5.

[0240] In a preferred embodiment, the target sequence is labeled with, e.g., a fluorescent, a chemiluminescent, a chemical, or a radioactive signal, to provide a means of detecting the target sequence's specific binding to a probe. The label also can be an enzyme, such as, alkaline phosphatase or horseradish peroxidase, which when provided with an appropriate substrate produces a product that can be detected. Alternatively, the label can be a labeled compound or small molecule, such as an enzyme inhibitor, that binds but is not catalyzed or altered by the enzyme. The label also can be a moiety or compound, such as, an epitope tag or biotin which specifically binds to streptavidin. For the example of biotin, the streptavidin is labeled as described above, thereby, providing a detectable signal for the bound target sequence. Unbound labeled streptavidin is typically removed prior to analysis.

[0241] Nucleic acid assays can be direct hybridization assays or can comprise “sandwich assays”, which include the use of multiple probes, as is generally outlined in U.S. Pat. No. Nos. 5,681,702, 5,597,909, 5,545,730, 5,594,117, 5,591,584, 5,571,670, 5,580,731, 5,571,670, 5,591,584, 5,624,802, 5,635,352, 5,594,118, 5,359,100, 5,124,246 and 5,681,697, all of which are hereby incorporated by reference herein. In this embodiment, in general, the target nucleic acid is prepared as outlined above, and then added to the biochip comprising a plurality of nucleic acid probes, under conditions that allow the formation of a hybridization complex.

[0242] A variety of hybridization conditions may be used in the present invention, including high, moderate and low stringency conditions as outlined above. The assays are generally run under stringency conditions which allow formation of the label probe hybridization complex only in the presence of target. Stringency can be controlled by altering a step parameter that is a thermodynamic variable, including, but not limited to, temperature, formamide concentration, salt concentration, chaotropic salt concentration, pH, organic solvent concentration, etc.

[0243] These parameters may also be used to control non-specific binding, as is generally outlined in U.S. Pat. No. 5,681,697, which is hereby incorporated by reference herein. Thus, it may be desirable to perform certain steps at higher stringency conditions to reduce non-specific binding.

[0244] The reactions outlined herein may be accomplished in a variety of ways. Components of the reaction may be added simultaneously, or sequentially, in different orders, with preferred embodiments outlined below. In addition, the reaction may include a variety of other reagents. These include salts, buffers, neutral proteins, e.g., albumin, detergents, etc. which may be used to facilitate optimal hybridization and detection, and/or reduce non-specific or background interactions. Reagents that otherwise improve the efficiency of the assay, such as protease inhibitors, nuclease inhibitors, anti-microbial agents, etc., may also be used as appropriate, depending on the sample preparation methods and purity of the target.

[0245] The assay data are analyzed to determine the expression levels, and changes in expression levels as between states, of individual genes, forming a gene expression profile.

[0246] Screens are performed to identify modulators of the metastatic breast cancer or metastatic lung cancer phenotype. In one embodiment, screening is performed to identify modulators that can induce or suppress a particular expression profile, thus preferably generating the associated phenotype. In another embodiment, e.g., for diagnostic applications, having identified differentially expressed genes important in a particular state, screens can be performed to identify modulators that alter expression of individual genes. In an another embodiment, screening is performed to identify modulators that alter a biological function of the expression product of a differentially expressed gene. Again, having identified the importance of a gene in a particular state, screens are performed to identify agents that bind and/or modulate the biological activity of the gene product, or evaluate genetic polymorphisms.

[0247] Genes can be screened for those that are induced in response to a candidate agent. After identifying a modulator based upon its ability to suppress a metastatic breast cancer or metastatic lung cancer expression pattern leading to a normal expression pattern, or to modulate a single metastatic breast cancer or metastatic lung cancer gene expression profile so as to mimic the expression of the gene from normal tissue, a screen as described above can be performed to identify genes that are specifically modulated in response to the agent. Comparing expression profiles between normal tissue and agent treated metastatic breast cancer or metastatic lung cancer tissue reveals genes that are not expressed in normal tissue or metastatic breast cancer or metastatic lung cancer tissue, but are expressed in agent treated tissue. These agent-specific sequences can be identified and used by methods described herein for metastatic breast cancer or metastatic lung cancer genes or proteins. In particular these sequences and the proteins they encode find use in marking or identifying agent treated cells. In addition, antibodies can be raised against the agent induced proteins and used to target novel therapeutics to the treated metastatic breast cancer or metastatic lung cancer tissue sample.

[0248] Thus, in one embodiment, a test compound is administered to a population of metastatic breast cancer or metastatic lung cancer cells, that have an associated metastatic breast cancer or metastatic lung cancer expression profile. By “administration” or “contacting” herein is meant that the candidate agent is added to the cells in such a manner as to allow the agent to act upon the cell, whether by uptake and intracellular action, or by action at the cell surface. In some embodiments, nucleic acid encoding a proteinaceous candidate agent (i.e., a peptide) may be put into a viral construct such as an adenoviral or retroviral construct, and added to the cell, such that expression of the peptide agent is accomplished, e.g., PCT US97/01019. Regulatable gene therapy systems can also be used.

[0249] Once the test compound has been administered to the cells, the cells can be washed if desired and are allowed to incubate under preferably physiological conditions for some period of time. The cells are then harvested and a new gene expression profile is generated, as outlined herein.

[0250] Thus, e.g., metastatic breast cancer or metastatic lung cancer tissue may be screened for agents that modulate, e.g., induce or suppress the metastatic breast cancer or metastatic lung cancer phenotype. A change in at least one gene, preferably many, of the expression profile indicates that the agent has an effect on metastatic breast cancer or metastatic lung cancer activity. By defining such a signature for the metastatic breast cancer or metastatic lung cancer phenotype, screens for new drugs that alter the phenotype can be devised. With this approach, the drug target need not be known and need not be represented in the original expression screening platform, nor does the level of transcript for the target protein need to change.

[0251] Measure of metastatic breast cancer or metastatic lung cancer polypeptide activity, or of metastatic breast cancer or metastatic lung cancer or the metastatic breast cancer or metastatic lung cancer phenotype can be performed using a variety of assays. For example, the effects of the test compounds upon the function of the metastatic polypeptides can be measured by examining parameters described above. A suitable physiological change that affects activity can be used to assess the influence of a test compound on the polypeptides of this invention. When the functional consequences are determined using intact cells or animals, one can also measure a variety of effects such as, in the case of metastatic breast cancer or metastatic lung cancer associated with tumors, tumor growth, tumor metastasis, neovascularization, hormone release, transcriptional changes to both known and uncharacterized genetic markers (e.g., northern blots), changes in cell metabolism such as cell growth or pH changes, and changes in intracellular second messengers such as cGMP. In the assays of the invention, mammalian metastatic breast cancer or metastatic lung cancer polypeptide is typically used, e.g., mouse, preferably human.

[0252] To perform assays in intact animals where the breast or lung cancer has metastasized to the brain, it may be necessary to provide special treatments to facilitate crossing of the blood brain barrier by the metastatic cancer modulator or therapeutic. Any method known in the art can be used to achieve this objective.

[0253] Assays to identify compounds with modulating activity can be performed in vitro. For example, a metastatic breast cancer or metastatic lung cancer polypeptide is first contacted with a potential modulator and incubated for a suitable amount of time, e.g., from 0.5 to 48 hours. In one embodiment, the metastatic breast cancer or metastatic lung cancer polypeptide levels are determined in vitro by measuring the level of protein or mRNA. The level of protein is measured using immunoassays such as western blotting, ELISA and the like with an antibody that selectively binds to the metastatic breast cancer or metastatic lung cancer polypeptide or a fragment thereof. For measurement of mRNA, amplification, e.g., using PCR, LCR, or hybridization assays, e.g., northern hybridization, RNAse protection, dot blotting, are preferred. The level of protein or mRNA is detected using directly or indirectly labeled detection agents, e.g., fluorescently or radioactively labeled nucleic acids, radioactively or enzymatically labeled antibodies, and the like, as described herein.

[0254] Alternatively, a reporter gene system can be devised using the metastatic breast cancer or metastatic lung cancer protein promoter operably linked to a reporter gene such as luciferase, green fluorescent protein, CAT, or β-gal. The reporter construct is typically transfected into a cell. After treatment with a potential modulator, the amount of reporter gene transcription, translation, or activity is measured according to standard techniques known to those of skill in the art.

[0255] In a preferred embodiment, as outlined above, screens may be done on individual genes and gene products (proteins). That is, having identified a particular differentially expressed gene as important in a particular state, screening of modulators of the expression of the gene or the gene product itself can be done. The gene products of differentially expressed genes are sometimes referred to herein as “metastatic breast cancer or metastatic lung cancer proteins.” The metastatic breast cancer or metastatic lung cancer protein may be a fragment, or alternatively, be the full length protein to a fragment shown herein.

[0256] In one embodiment, screening for modulators of expression of specific genes is performed. Typically, the expression of only one or a few genes are evaluated. In another embodiment, screens are designed to first find compounds that bind to differentially expressed proteins. These compounds are then evaluated for the ability to modulate differentially expressed activity. Moreover, once initial candidate compounds are identified, variants can be further screened to better evaluate structure activity relationships.

[0257] In a preferred embodiment, binding assays are done. In general, purified or isolated gene product is used; that is, the gene products of one or more differentially expressed nucleic acids are made. For example, antibodies are generated to the protein gene products, and standard immunoassays are run to determine the amount of protein present. Alternatively, cells comprising the metastatic breast cancer or metastatic lung cancer proteins can be used in the assays.

[0258] Thus, in a preferred embodiment, the methods comprise combining a metastatic breast cancer or metastatic lung cancer protein and a candidate compound, and determining the binding of the compound to the metastatic breast cancer or metastatic lung cancer protein. Preferred embodiments utilize the human metastatic breast cancer or metastatic lung cancer protein, although other mammalian proteins may also be used, e.g., for the development of animal models of human disease. In some embodiments, as outlined herein, variant or derivative metastatic breast cancer or metastatic lung cancer proteins may be used.

[0259] Generally, in a preferred embodiment of the methods herein, the metastatic breast cancer or metastatic lung cancer protein or the candidate agent is non-diffusably bound to an insoluble support having isolated sample receiving areas (e.g., a microtiter plate, an array, etc.). The insoluble supports may be made of any composition to which the compositions can be bound, is readily separated from soluble material, and is otherwise compatible with the overall method of screening. The surface of such supports may be solid or porous and of any convenient shape. Examples of suitable insoluble supports include microtiter plates, arrays, membranes and beads. These are typically made of glass, plastic (e.g., polystyrene), polysaccharides, nylon or nitrocellulose, TEFLON®, etc. Microtiter plates and arrays are especially convenient because a large number of assays can be carried out simultaneously, using small amounts of reagents and samples. The particular manner of binding of the composition is not crucial so long as it is compatible with the reagents and overall methods of the invention, maintains the activity of the composition and is nondiffusable. Preferred methods of binding include the use of antibodies (which do not sterically block either the ligand binding site or activation sequence when the protein is bound to the support), direct binding to “sticky” or ionic supports, chemical crosslinking, the synthesis of the protein or agent on the surface, etc. Following binding of the protein or agent, excess unbound material is removed by washing. The sample receiving areas may then be blocked through incubation with bovine serum albumin (BSA), casein or other innocuous protein or other moiety.

[0260] In a preferred embodiment, the metastatic breast cancer or metastatic lung cancer protein is bound to the support, and a test compound is added to the assay. Alternatively, the candidate agent is bound to the support and the metastatic breast cancer or metastatic lung cancer protein is added. Novel binding agents include specific antibodies, non-natural binding agents identified in screens of chemical libraries, peptide analogs, etc. Of particular interest are screening assays for agents that have a low toxicity for human cells. A wide variety of assays may be used for this purpose, including labeled in vitro protein-protein binding assays, electrophoretic mobility shift assays, immunoassays for protein binding, functional assays (phosphorylation assays, etc.) and the like.

[0261] The determination of the binding of the test modulating compound to the metastatic breast cancer or metastatic lung cancer protein may be done in a number of ways. In a preferred embodiment, the compound is labeled, and binding determined directly, e.g., by attaching all or a portion of the metastatic breast cancer or metastatic lung cancer protein to a solid support, adding a labeled candidate agent (e.g., a fluorescent label), washing off excess reagent, and determining whether the label is present on the solid support. Various blocking and washing steps may be utilized as appropriate.

[0262] In some embodiments, only one of the components is labeled, e.g., the proteins (or proteinaceous candidate compounds) can be labeled. Alternatively, more than one component can be labeled with different labels, e.g., 1251 for the proteins and a fluorophor for the compound. Proximity reagents, e.g., quenching or energy transfer reagents are also useful.

[0263] In one embodiment, the binding of the test compound is determined by competitive binding assay. The competitor is a binding moiety known to bind to the target molecule (i.e., a metastatic breast cancer or metastatic lung cancer protein), such as an antibody, peptide, binding partner, ligand, etc. Under certain circumstances, there may be competitive binding between the compound and the binding moiety, with the binding moiety displacing the compound. In one embodiment, the test compound is labeled. Either the compound, or the competitor, or both, is added first to the protein for a time sufficient to allow binding, if present. Incubations may be performed at a temperature which facilitates optimal activity, typically between 4 and 40° C. Incubation periods are typically optimized, e.g., to facilitate rapid high throughput screening. Typically between 0.1 and 1 hour will be sufficient. Excess reagent is generally removed or washed away. The second component is then added, and the presence or absence of the labeled component is followed, to indicate binding.

[0264] In a preferred embodiment, the competitor is added first, followed by the test compound. Displacement of the competitor is an indication that the test compound is binding to the metastatic breast cancer or metastatic lung cancer protein and thus is capable of binding to, and potentially modulating, the activity of the metastatic breast cancer or metastatic lung cancer protein. In this embodiment, either component can be labeled. Thus, e.g., if the competitor is labeled, the presence of label in the wash solution indicates displacement by the agent. Alternatively, if the test compound is labeled, the presence of the label on the support indicates displacement.

[0265] In an alternative embodiment, the test compound is added first, with incubation and washing, followed by the competitor. The absence of binding by the competitor may indicate that the test compound is bound to the metastatic breast cancer or metastatic lung cancer protein with a higher affinity. Thus, if the test compound is labeled, the presence of the label on the support, coupled with a lack of competitor binding, may indicate that the test compound is capable of binding to the metastatic breast cancer or metastatic lung cancer protein.

[0266] In a preferred embodiment, the methods comprise differential screening to identity agents that are capable of modulating the activity of the metastatic breast cancer or metastatic lung cancer proteins. In this embodiment, the methods comprise combining a metastatic breast cancer or metastatic lung cancer protein and a competitor in a first sample. A second sample comprises a test compound, a metastatic breast cancer or metastatic lung cancer protein, and a competitor. The binding of the competitor is determined for both samples, and a change, or difference in binding between the two samples indicates the presence of an agent capable of binding to the metastatic breast cancer or metastatic lung cancer protein and potentially modulating its activity. That is, if the binding of the competitor is different in the second sample relative to the first sample, the agent is capable of binding to the metastatic breast cancer or metastatic lung cancer protein.

[0267] Alternatively, differential screening is used to identify drug candidates that bind to the native metastatic breast cancer or metastatic lung cancer protein, but cannot bind to modified metastatic breast cancer or metastatic lung cancer proteins. The structure of the metastatic breast cancer or metastatic lung cancer protein may be modeled, and used in rational drug design to synthesize agents that interact with that site. Drug candidates that affect the activity of a metastatic breast cancer or metastatic lung cancer protein are also identified by screening drugs for the ability to either enhance or reduce the activity of the protein.

[0268] Positive controls and negative controls may be used in the assays. Preferably control and test samples are performed in at least triplicate to obtain statistically significant results. Incubation of all samples is for a time sufficient for the binding of the agent to the protein. Following incubation, samples are washed free of non-specifically bound material and the amount of bound, generally labeled agent determined. For example, where a radiolabel is employed, the samples may be counted in a scintillation counter to determine the amount of bound compound.

[0269] A variety of other reagents may be included in the screening assays. These include reagents like salts, neutral proteins, e.g., albumin, detergents, etc. which may be used to facilitate optimal protein-protein binding and/or reduce non-specific or background interactions. Also reagents that otherwise improve the efficiency of the assay, such as protease inhibitors, nuclease inhibitors, anti-microbial agents, etc., may be used. The mixture of components may be added in an order that provides for the requisite binding.

[0270] In a preferred embodiment, the invention provides methods for screening for a compound capable of modulating the activity of a metastatic breast cancer or metastatic lung cancer protein. The methods comprise adding a test compound, as defined above, to a cell comprising metastatic breast cancer or metastatic lung cancer proteins. Preferred cell types include almost any cell. The cells contain a recombinant nucleic acid that encodes a metastatic breast cancer or metastatic lung cancer protein. In a preferred embodiment, a library of candidate agents are tested on a plurality of cells.

[0271] In one aspect, the assays are evaluated in the presence or absence or previous or subsequent exposure of physiological signals, e.g., hormones, antibodies, peptides, antigens, cytokines, growth factors, action potentials, pharmacological agents including chemotherapeutics, radiation, carcinogenics, or other cells (i.e. cell-cell contacts). In another example, the determinations are determined at different stages of the cell cycle process.

[0272] In this way, compounds that modulate metastatic breast cancer or metastatic lung cancer agents are identified. Compounds with pharmacological activity are able to enhance or interfere with the activity of the metastatic breast cancer or metastatic lung cancer protein. Once identified, similar structures are evaluated to identify critical structural feature of the compound.

[0273] In one embodiment, a method of inhibiting metastatic breast cancer or metastatic lung cancer cell division is provided. The method comprises administration of a metastatic breast cancer or metastatic lung cancer inhibitor. In another embodiment, a method of inhibiting metastatic breast cancer or metastatic lung cancer is provided. The method comprises administration of a metastatic breast cancer or metastatic lung cancer inhibitor. In a further embodiment, methods of treating cells or individuals with metastatic breast cancer or metastatic lung cancer are provided. The method comprises administration of a metastatic breast cancer or metastatic lung cancer inhibitor.

[0274] A variety of cell growth, proliferation, and metastasis assays are known to those of skill in the art, as described below.

Soft Agar Growth or Colony Formation in Suspension

[0275] Normal cells require a solid substrate to attach and grow. When the cells are transformed, they lose this phenotype and grow detached from the substrate. For example, transformed cells can grow in stirred suspension culture or suspended in semi-solid media, such as semi-solid or soft agar. The transformed cells, when transfected with tumor suppressor genes, regenerate normal phenotype and require a solid substrate to attach and grow. Soft agar growth or colony formation in suspension assays can be used to identify modulators of metastatic breast cancer or metastatic lung cancer sequences, which when expressed in host cells, inhibit abnormal cellular proliferation and transformation. A therapeutic compound would reduce or eliminate the host cells' ability to grow in stirred suspension culture or suspended in semi-solid media, such as semi-solid or soft.

[0276] Techniques for soft agar growth or colony formation in suspension assays are described in Freshney, Culture of Animal Cells a Manual of Basic Technique (3^{rd} ed., 1994), herein incorporated by reference. See also, the methods section of Garkavtsev et al. (1996), supra, herein incorporated by reference.

Contact Inhibition and Density Limitation of Growth

[0277] Normal cells typically grow in a flat and organized pattern in a petri dish until they touch other cells. When the cells touch one another, they are contact inhibited and stop growing. When cells are transformed, however, the cells are not contact inhibited and continue to grow to high densities in disorganized foci. Thus, the transformed cells grow to a higher saturation density than normal cells. This can be detected morphologically by the formation of a disoriented monolayer of cells or rounded cells in foci within the regular pattern of normal surrounding cells. Alternatively, labeling index with (³H)-thymidine at saturation density can be used to measure density limitation of growth. See Freshney (1994), supra. The transformed cells, when transfected with tumor suppressor genes, regenerate a normal phenotype and become contact inhibited and would grow to a lower density.

[0278] In this assay, labeling index with (³H)-thymidine at saturation density is a preferred method of measuring density limitation of growth. Transformed host cells are transfected with a metastatic breast cancer or metastatic lung cancer-associated sequence and are grown for 24 hours at saturation density in non-limiting medium conditions. The percentage of cells labeling with (³H)-thymidine is determined autoradiographically. See, Freshney (1994), supra.

Growth factor or Serum Dependence

[0279] Transformed cells have a lower serum dependence than their normal counterparts (see, e.g., Temin, J. Natl. Cancer Insti. 37:167-175 (1966); Eagle et al., J. Exp. Med. 131:836-879 (1970)); Freshney, supra. This is in part due to release of various growth factors by the transformed cells. Growth factor or serum dependence of transformed host cells can be compared with that of control.

Tumor Specific Markers Levels

[0280] Tumor cells release an increased amount of certain factors (hereinafter “tumor specific markers”) than their normal counterparts. For example, plasminogen activator (PA) is released from human glioma at a higher level than from normal brain cells (see, e.g., Gullino, Angiogenesis, tumor vascularization, and potential interference with tumor growth. in Biological Responses in Cancer, pp. 178-184 (Mihich (ed.) 1985)). Similarly, Tumor angiogenesis factor (TAF) is released at a higher level in tumor cells than their normal counterparts. See, e.g., Folkman, Angiogenesis and Cancer, Sem Cancer Biol. (1992)).

[0281] Various techniques which measure the release of these factors are described in Freshney (1994), supra. Also, see, Unkless et al. , J. Biol. Chem. 249:4295-4305 (1974); Strickland & Beers, J. Biol. Chem. 251:5694-5702 (1976); Whur et al., Br. J. Cancer 42:305-312 (1980); Angiogenesis, tumor vascularization, and potential intereference with tumor growth. in Biological Responses in Cancer, pp. 178-184 (Mihich (ed.) 1985); Freshney Anticancer Res. 5:111-130 (1985).

Invasiveness into Matrigel

[0282] The degree of invasiveness into Matrigel or some other extracellular matrix constituent can be used as an assay to identify compounds that modulate metastatic breast cancer or metastatic lung cancer-associated sequences. Tumor cells exhibit a good correlation between malignancy and invasiveness of cells into Matrigel or some other extracellular matrix constituent. In this assay, tumorigenic cells are typically used as host cells. Expression of a tumor suppressor gene in these host cells would decrease invasiveness of the host cells.

[0283] Techniques described in Freshney (1994), supra, can be used. Briefly, the level of invasion of host cells can be measured by using filters coated with Matrigel or some other extracellular matrix constituent. Penetration into the gel, or through to the distal side of the filter, is rated as invasiveness, and rated histologically by number of cells and distance moved, or by prelabeling the cells with ¹²⁵I and counting the radioactivity on the distal side of the filter or bottom of the dish. See, e.g., Freshney (1984), supra.

Tumor Growth in Vivo

[0284] Effects of metastatic breast cancer or metastatic lung cancer-associated sequences on cell growth can be tested in transgenic or immune-suppressed mice. Knock-out transgenic mice can be made, in which the metastatic breast cancer or metastatic lung cancer gene is disrupted or in which a metastatic breast cancer or metastatic lung cancer gene is inserted. Knock-out transgenic mice can be made by insertion of a marker gene or other heterologous gene into the endogenous metastatic breast cancer or metastatic lung cancer gene site in the mouse genome via homologous recombination. Such mice can also be made by substituting the endogenous metastatic breast cancer or metastatic lung cancer gene with a mutated version of the metastatic breast cancer or metastatic lung cancer gene, or by mutating the endogenous metastatic breast cancer or metastatic lung cancer gene, e.g., by exposure to carcinogens.

[0285] A DNA construct is introduced into the nuclei of embryonic stem cells. Cells containing the newly engineered genetic lesion are injected into a host mouse embryo, which is re-implanted into a recipient female. Some of these embryos develop into chimeric mice that possess germ cells partially derived from the mutant cell line. Therefore, by breeding the chimeric mice it is possible to obtain a new line of mice containing the introduced genetic lesion (see, e.g., Capecchi et al., Science 244:1288 (1989)). Chimeric targeted mice can be derived according to Hogan et al., Manipulating the Mouse Embryo: A Laboratory Manual, Cold Spring Harbor Laboratory (1988) and Teratocarcinomas and Embryonic Stem Cells: A Practical Approach, Robertson, ed., IRL Press, Washington, D.C., (1987).

[0286] Alternatively, various immune-suppressed or immune-deficient host animals can be used. For example, genetically athymic “nude” mouse (see, e.g., Giovanella et al., J. Natl. Cancer Inst. 52:921 (1974)), a SCID mouse, a thymectomized mouse, or an irradiated mouse (see, e.g., Bradley et al., Br. J. Cancer 38:263 (1978); Selby et al., Br. J Cancer 41:52 (1980)) can be used as a host. Transplantable tumor cells (typically about 10⁶ cells) injected into isogenic hosts will produce invasive tumors in a high proportions of cases, while normal cells of similar origin will not. In hosts which developed invasive tumors, cells expressing a metastatic breast cancer or metastatic lung cancer-associated sequences are injected subcutaneously. After a suitable length of time, preferably 4-8 weeks, tumor growth is measured (e.g., by volume or by its two largest dimensions) and compared to the control. Tumors that have statistically significant reduction (using, e.g., Student's T test) are said to have inhibited growth. Additionally, human tumor cells expressing the genes of the invention may be injected into immune compromised animals. Growth of these tumors, or xenografts, is compared to growth of similar human tumor cell that do not express the genes of the invention. These animals may also be used to binding assays and efficacy studies for therapeutic compounds that modulate metastatic breast cancer or metastatic lung cancer, such as antibodies or small molecules.

### Polynucleotide Modulators of Metastatic Breast Cancer or Metastatic Lung Cancer

Antisense Polynucleotides

[0287] In certain embodiments, the activity of a metastatic breast cancer or metastatic lung cancer-associated protein is downregulated, or entirely inhibited, by the use of antisense polynucleotide, i.e., a nucleic acid complementary to, and which can preferably hybridize specifically to, a coding mRNA nucleic acid sequence, e.g., a metastatic breast cancer or metastatic lung cancer protein mRNA, or a subsequence thereof. Binding of the antisense polynucleotide to the mRNA reduces the translation and/or stability of the mRNA.

[0288] In the context of this invention, antisense polynucleotides can comprise naturally-occurring nucleotides, or synthetic species formed from naturally-occurring subunits or their close homologs. Antisense polynucleotides may also have altered sugar moieties or inter-sugar linkages. Exemplary among these are the phosphorothioate and other sulfur containing species which are known for use in the art. Analogs are comprehended by this invention so long as they function effectively to hybridize with the metastatic breast cancer or metastatic lung cancer protein mRNA. See, e.g., Isis Pharmaceuticals, Carlsbad, Calif.; Sequitor, Inc., Natick, Mass.

[0289] Such antisense polynucleotides can readily be synthesized using recombinant means, or can be synthesized in vitro. Equipment for such synthesis is sold by several vendors, including Applied Biosystems (Norwalk, Conn.). The preparation of other oligonucleotides such as phosphorothioates and alkylated derivatives is also well known to those of skill in the art.

[0290] Antisense molecules as used herein include antisense or sense oligonucleotides. Sense oligonucleotides can, e.g., be employed to block transcription by binding to the anti-sense strand. The antisense and sense oligonucleotide comprise a single-stranded nucleic acid sequence (either RNA or DNA) capable of binding to target mRNA (sense) or DNA (antisense) sequences for metastatic breast cancer or metastatic lung cancer molecules. A preferred antisense molecule is for a metastatic breast cancer or metastatic lung cancer sequence selected from those listed in Tables 1A-12C, or for a ligand or activator thereof. Antisense or sense oligonucleotides, according to the present invention, comprise a fragment generally at least about 14 nucleotides, preferably from about 14 to 30 nucleotides. The ability to derive an antisense or a sense oligonucleotide, based upon a cDNA sequence encoding a given protein is described in, e.g., Stein & Cohen (Cancer Res. 48:2659 (1988 and van der Krol et al. (BioTechniques 6:958 (1988)).

Ribozymes

[0291] In addition to antisense polynucleotides, ribozymes can be used to target and inhibit transcription of metastatic breast cancer or metastatic lung cancer-associated nucleotide sequences. A ribozyme is an RNA molecule that catalytically cleaves other RNA molecules. Different kinds of ribozymes have been described, including group I ribozymes, hammerhead ribozymes, hairpin ribozymes, RNase P, and axhead ribozymes (see, e.g., Castanotto et al., Adv. in Pharmacology 25: 289-317 (1994) for a general review of the properties of different ribozymes).

[0292] The general features of hairpin ribozymes are described, e.g., in Hampel et al., Nucl. Acids Res. 18:299-304 (1990); European Patent Publication No. 0 360 257; U.S. Pat. No. 5,254,678, which is hereby incorporated by reference herein. Methods of preparing are well known to those of skill in the art (see, e.g., WO 94/26877; Ojwang et al., Proc. Natl. Acad. Sci. USA 90:6340-6344 (1993); Yamada et al., Human Gene Therapy 1:39-45 (1994); Leavitt et al., Proc. Natl. Acad. Sci. USA 92:699-703 (1995); Leavitt et al., Human Gene Therapy 5:1151-120 (1994); and Yamada et al., Virology 205: 121-126 (1994)).

[0293] Polynucleotide modulators of metastatic breast cancer or metastatic lung cancer may be introduced into a cell containing the target nucleotide sequence by formation of a conjugate with a ligand binding molecule, as described in WO 91/04753. Suitable ligand binding molecules include, but are not limited to, cell surface receptors, growth factors, other cytokines, or other ligands that bind to cell surface receptors. Preferably, conjugation of the ligand binding molecule does not substantially interfere with the ability of the ligand binding molecule to bind to its corresponding molecule or receptor, or block entry of the sense or antisense oligonucleotide or its conjugated version into the cell. Alternatively, a polynucleotide modulator of metastatic breast cancer or metastatic lung cancer may be introduced into a cell containing the target nucleic acid sequence, e.g., by formation of an polynucleotide-lipid complex, as described in WO 90/10448. It is understood that the use of antisense molecules or knock out and knock in models may also be used in screening assays as discussed above, in addition to methods of treatment.

[0294] Thus, in one embodiment, methods of modulating metastatic breast cancer or metastatic lung cancer in cells or organisms are provided. In one embodiment, the methods comprise administering to a cell an anti-metastatic breast cancer or metastatic lung cancer antibody that reduces or eliminates the biological activity of an endogenous metastatic breast cancer or metastatic lung cancer protein. Alternatively, the methods comprise administering to a cell or organism a recombinant nucleic acid encoding a metastatic breast cancer or metastatic lung cancer protein. This may be accomplished in any number of ways. In a preferred embodiment, e.g., when the metastatic breast cancer or metastatic lung cancer sequence is down-regulated in metastatic breast cancer or metastatic lung cancer, such state may be reversed by increasing the amount of metastatic breast cancer or metastatic lung cancer gene product in the cell. This can be accomplished, e.g., by overexpressing the endogenous metastatic breast cancer or metastatic lung cancer gene or administering a gene encoding the metastatic breast cancer or metastatic lung cancer sequence, using known gene-therapy techniques. In a preferred embodiment, the gene therapy techniques include the incorporation of the exogenous gene using enhanced homologous recombination (EHR), e.g., as described in PCT/US93/03868, hereby incorporated by reference in its entirety. Alternatively, e.g., when the metastatic breast cancer or metastatic lung cancer sequence is up-regulated in metastatic breast cancer or metastatic lung cancer, the activity of the endogenous metastatic breast cancer or metastatic lung cancer gene is decreased, e.g., by the administration of a metastatic breast cancer or metastatic lung cancer antisense nucleic acid.

[0295] In one embodiment, the metastatic breast cancer or metastatic lung cancer proteins of the present invention may be used to generate polyclonal and monoclonal antibodies to metastatic breast cancer or metastatic lung cancer proteins. Similarly, the metastatic breast cancer or metastatic lung cancer proteins can be coupled, using standard technology, to affinity chromatography columns. These columns may then be used to purify metastatic breast cancer or metastatic lung cancer antibodies useful for production, diagnostic, or therapeutic purposes. In a preferred embodiment, the antibodies are generated to epitopes unique to a metastatic breast cancer or metastatic lung cancer protein; that is, the antibodies show little or no cross-reactivity to other proteins. The metastatic breast cancer or metastatic lung cancer antibodies may be coupled to standard affinity chromatography columns and used to purify metastatic breast cancer or metastatic lung cancer proteins. The antibodies may also be used as blocking polypeptides, as outlined above, since they will specifically bind to the metastatic breast cancer or metastatic lung cancer protein.

### Methods of Identifying Variant Metastatic Breast Cancer or Metastatic Lung Cancer-associated Sequences

[0296] Without being bound by theory, expression of various metastatic breast cancer or metastatic lung cancer sequences is correlated with metastatic breast cancer or metastatic lung cancer. Accordingly, disorders based on mutant or variant metastatic breast cancer or metastatic lung cancer genes may be determined. In one embodiment, the invention provides methods for identifying cells containing variant metastatic breast cancer or metastatic lung cancer genes, e.g., determining all or part of the sequence of at least one endogenous metastatic breast cancer or metastatic lung cancer genes in a cell. This may be accomplished using any number of sequencing techniques. In a preferred embodiment, the invention provides methods of identifying the metastatic breast cancer or metastatic lung cancer genotype of an individual, e.g., determining all or part of the sequence of at least one metastatic breast cancer or metastatic lung cancer gene of the individual. This is generally done in at least one tissue of the individual, and may include the evaluation of a number of tissues or different samples of the same tissue. The method may include comparing the sequence of the sequenced metastatic breast cancer or metastatic lung cancer gene to a known metastatic breast cancer or metastatic lung cancer gene, i.e., a wild-type gene.

[0297] The sequence of all or part of the metastatic breast cancer or metastatic lung cancer gene can then be compared to the sequence of a known metastatic breast cancer or metastatic lung cancer gene to determine if any differences exist. This can be done using any number of known homology programs, such as Bestfit, etc. In a preferred embodiment, the presence of a difference in the sequence between the metastatic breast cancer or metastatic lung cancer gene of the patient and the known metastatic breast cancer or metastatic lung cancer gene correlates with a disease state or a propensity for a disease state, as outlined herein.

[0298] In a preferred embodiment, the metastatic breast cancer or metastatic lung cancer genes are used as probes to determine the number of copies of the metastatic breast cancer or metastatic lung cancer gene in the genome.

[0299] In another preferred embodiment, the metastatic breast cancer or metastatic lung cancer genes are used as probes to determine the chromosomal localization of the metastatic breast cancer or metastatic lung cancer genes. Information such as chromosomal localization finds use in providing a diagnosis or prognosis in particular when chromosomal abnormalities such as translocations, and the like are identified in the metastatic breast cancer or metastatic lung cancer gene locus.

### Administration of Pharmaceutical and Vaccine Compositions

[0300] In one embodiment, a therapeutically effective dose of a metastatic breast cancer or metastatic lung cancer protein or modulator thereof, is administered to a patient. By “therapeutically effective dose” herein is meant a dose that produces effects for which it is administered. The exact dose will depend on the purpose of the treatment, and will be ascertainable by one skilled in the art using known techniques (e.g., Ansel et al., Pharmaceutical Dosage Forms and Drug Delivery; Lieberman, Pharmaceutical Dosage Forms (vols. 1-3, 1992), Dekker, ISBN 0824770846, 082476918X, 0824712692, 0824716981; Lloyd, The Art, Science and Technology of pharmaceutical Compounding (1999); and Pickar, Dosage Calculations (1999)). As is known in the art, adjustments for metastatic breast cancer or metastatic lung cancer degradation, systemic versus localized delivery, and rate of new protease synthesis, as well as the age, body weight, general health, sex, diet, time of administration, drug interaction and the severity of the condition may be necessary, and will be ascertainable with routine experimentation by those skilled in the art.

[0301] A “patient” for the purposes of the present invention includes both humans and other animals, particularly mammals. Thus the methods are applicable to both human therapy and veterinary applications. In the preferred embodiment the patient is a mammal, preferably a primate, and in the most preferred embodiment the patient is human.

[0302] The administration of the metastatic breast cancer or metastatic lung cancer proteins and modulators thereof of the present invention can be done in a variety of ways as discussed above, including, but not limited to, orally, subcutaneously, intravenously, intranasally, transdermally, intraperitoneally, intramuscularly, intrapulmonary, vaginally, rectally, or intraocularly. In some instances, e.g., in the treatment of wounds and inflammation, the metastatic breast cancer or metastatic lung cancer proteins and modulators may be directly applied as a solution or spray.

[0303] The pharmaceutical compositions of the present invention comprise a metastatic breast cancer or metastatic lung cancer protein in a form suitable for administration to a patient. In the preferred embodiment, the pharmaceutical compositions are in a water soluble form, such as being present as pharmaceutically acceptable salts, which is meant to include both acid and base addition salts. “Pharmaceutically acceptable acid addition salt” refers to those salts that retain the biological effectiveness of the free bases and that are not biologically or otherwise undesirable, formed with inorganic acids such as hydrochloric acid, hydrobromic acid, sulfuric acid, nitric acid, phosphoric acid and the like, and organic acids such as acetic acid, propionic acid, glycolic acid, pyruvic acid, oxalic acid, maleic acid, malonic acid, succinic acid, ftimaric acid, tartaric acid, citric acid, benzoic acid, cinnamic acid, mandelic acid, methanesulfonic acid, ethanesulfonic acid, p-toluenesulfonic acid, salicylic acid and the like. “Pharmaceutically acceptable base addition salts” include those derived from inorganic bases such as sodium, potassium, lithium, ammonium, calcium, magnesium, iron, zinc, copper, manganese, aluminum salts and the like. Particularly preferred are the ammonium, potassium, sodium, calcium, and magnesium salts. Salts derived from pharmaceutically acceptable organic non-toxic bases include salts of primary, secondary, and tertiary amines, substituted amines including naturally occurring substituted amines, cyclic amines and basic ion exchange resins, such as isopropylamine, trimethylamine, diethylamine, triethylamine, tripropylamine, and ethanolamine.

[0304] The pharmaceutical compositions may also include one or more of the following: carrier proteins such as serum albumin; buffers; fillers such as microcrystalline cellulose, lactose, corn and other starches; binding agents; sweeteners and other flavoring agents; coloring agents; and polyethylene glycol.

[0305] The pharmaceutical compositions can be administered in a variety of unit dosage forms depending upon the method of administration. For example, unit dosage forms suitable for oral administration include, but are not limited to, powder, tablets, pills, capsules and lozenges. It is recognized that metastatic breast cancer or metastatic lung cancer protein modulators (e.g., antibodies, antisense constructs, ribozymes, small organic molecules, etc.) when administered orally, should be protected from digestion. It is also recognized that, after delivery to other sites in the body (e.g., circulatory system, lymphatic system, or the tumor site) the metastatic breast cancer or metastatic lung cancer modulators of the invention may need to be protected from excretion, hydrolisis, proteolytic digestion or modification, or detoxification by the liver. In all these cases, protection is typically accomplished either by complexing the molecule(s) with a composition to render it resistant to acidic and enzymatic. hydrolysis, or by packaging the molecule(s) in an appropriately resistant carrier, such as a liposome or a protection barrier or by modifying the molecular size, weight, and/or charge of the modulator. Means of protecting agents from digestion degradation, and excretion are well known in the art.

[0306] The compositions for administration will commonly comprise a metastatic breast cancer or metastatic lung cancer protein modulator dissolved in a pharmaceutically acceptable carrier, preferably an aqueous carrier. A variety of aqueous carriers can be used, e.g., buffered saline and the like. These solutions are sterile and generally free of undesirable matter. These compositions may be sterilized by conventional, well known sterilization techniques. The compositions may contain pharmaceutically acceptable auxiliary substances as required to approximate physiological conditions such as pH adjusting and buffering agents, toxicity adjusting agents and the like, e.g., sodium acetate, sodium chloride, potassium chloride, calcium chloride, sodium lactate and the like. The concentration of active agent in these formulations can vary widely, and will be selected primarily based on fluid volumes, viscosities, body weight and the like in accordance with the particular mode of administration selected and the patient's needs (e.g., Remington's Pharmaceutical Science (15th ed., 1980) and Goodman & Gillman, The Pharmacologial Basis of Therapeutics (Hardman et al., eds., 1996)).

[0307] Thus, a typical pharmaceutical composition for intravenous administration would be about 0.1 to 10 mg per patient per day. Dosages from 0.1 up to about 100 mg per patient per day may be used, particularly when the drug is administered to a secluded site and not into the blood stream, such as into a body cavity or into a lumen of an organ. Substantially higher dosages are possible in topical administration. Actual methods for preparing parenterally administrable compositions will be known or apparent to those skilled in the art, e.g., Remington's Pharmaceutical Science and Goodman and Gillman, The Pharmacologial Basis of Therapeutics, supra.

[0308] The compositions containing modulators of metastatic breast cancer or metastatic lung cancer proteins can be administered for therapeutic or prophylactic treatments. In therapeutic applications, compositions are administered to a patient suffering from a disease (e.g., a cancer) in an amount sufficient to cure or at least partially arrest the disease and its complications. An amount adequate to accomplish this is defined as a “therapeutically effective dose.” Amounts effective for this use will depend upon the severity of the disease and the general state of the patient's health. Single or multiple administrations of the compositions may be administered depending on the dosage and frequency as required and tolerated by the patient. In any event, the composition should provide a sufficient quantity of the agents of this invention to effectively treat the patient. An amount of modulator that is capable of preventing or slowing the development of cancer in a mammal is referred to as a “prophylactically effective dose.” The particular dose required for a prophylactic treatment will depend upon the medical condition and history of the mammal, the particular cancer being prevented, as well as other factors such as age, weight, gender, administration route, efficiency, etc. Such prophylactic treatments may be used, e.g., in a mammal who has previously had cancer to prevent a recurrence of the cancer, or in a mammal who is suspected of having a significant likelihood of developing cancer.

[0309] It will be appreciated that the present metastatic breast cancer or metastatic lung cancer protein-modulating compounds can be administered alone or in combination with additional metastatic breast cancer or metastatic lung cancer modulating compounds or with other therapeutic agent, e.g., other anti-cancer agents or treatments.

[0310] In numerous embodiments, one or more nucleic acids, e.g., polynucleotides comprising nucleic acid sequences set forth in Tables 1A-12C, such as antisense polynucleotides or ribozymes, will be introduced into cells, in vitro or in vivo. The present invention provides methods, reagents, vectors, and cells useful for expression of metastatic breast cancer or metastatic lung cancer-associated polypeptides and nucleic acids using in vitro (cell-free), ex vivo or in vivo (cell or organism-based) recombinant expression systems.

[0311] The particular procedure used to introduce the nucleic acids into a host cell for expression of a protein or nucleic acid is application specific. Many procedures for introducing foreign nucleotide sequences into host cells may be used. These include the use of calcium phosphate transfection, spheroplasts, electroporation, liposomes, microinjection, plasma vectors, viral vectors and any of the other well known methods for introducing cloned genomic DNA, cDNA, synthetic DNA or other foreign genetic material into a host cell (see, e.g., Berger & Kimmel, Guide to Molecular Cloning Techniques, Methods in Enzymology volume 152 (Berger), Ausubel et al., eds., Current Protocols (supplemented through 1999), and Sambrook et al., Molecular Cloning—A Laboratory Manual (2nd ed., Vol. 1-3, 1989.

[0312] In a preferred embodiment, metastatic breast cancer or metastatic lung cancer proteins and modulators are administered as therapeutic agents, and can be formulated as outlined above. Similarly, metastatic breast cancer or metastatic lung cancer genes (including both the full-length sequence, partial sequences, or regulatory sequences of the metastatic breast cancer or metastatic lung cancer coding regions) can be administered in a gene therapy application. These metastatic breast cancer or metastatic lung cancer genes can include antisense applications, either as gene therapy (i.e., for incorporation into the genome) or as antisense compositions, as will be appreciated by those in the art.

[0313] Metastatic breast cancer or metastatic lung cancer polypeptides and polynucleotides can also be administered as vaccine compositions to stimulate HTL, CTL and antibody responses. Such vaccine compositions can include, e.g., lipidated peptides (see, e.g.,Vitiello, et al., J. Clin. Invest. 95:341 (1995)), peptide compositions encapsulated in poly(DL-lactide-co-glycolide) (“PLG”) microspheres (see, e.g., Eldridge, et al., Molec. Immunol. 28:287-294, (1991); Alonso et al., Vaccine 12:299-306 (1994); Jones et al., Vaccine 13:675-681 (1995)), peptide compositions contained in immune stimulating complexes (ISCOMS) (see, e.g., Takahashi et al., Nature 344:873-875 (1990); Hu et al., Clin Exp Immunol. 113:235-243 (1998)), multiple antigen peptide systems (MAPs) (see, e.g., Tam, Proc. Natl. Acad. Sci. U.S.A. 85:5409-5413 (1988); Tam, J. Immunol. Methods 196:17-32 (1996)), peptides formulated as multivalent peptides; peptides for use in ballistic delivery systems, typically crystallized peptides, viral delivery vectors (Perkus, et al., In: Concepts in vaccine development (Kaufmann, ed., p. 379, 1996); Chakrabarti, et al., Nature 320:535 (1986); Hu et al., Nature 320:537 (1986); Kieny, et al., AIDS Bio/Technology 4:790 (1986); Top et al., J. Infect. Dis. 124:148 (1971); Chanda et al., Virology 175:535 (1990)), particles of viral or synthetic origin (see, e.g., Kofler et al., J. Immunol. Methods. 192:25 (1996); Eldridge et al., Sem. Hematol. 30:16 (1993); Falo et al., Nature Med. 7:649 (1995)), adjuvants (Warren et al., Annu. Rev. Immunol. 4:369 (1986); Gupta et al., Vaccine 11:293 (1993)), liposomes (Reddy et al., J. Immunol. 148:1585 (1992); Rock, Immunol. Today 17:131 (1996)), or, naked or particle absorbed cDNA (Ulmer, et al., Science 259:1745 (1993); Robinson et al., Vaccine 11:957 (1993); Shiver et al., In: Concepts in vaccine development (Kaufinann, ed., p. 423, 1996); Cease & Berzofsky, Annu. Rev. Immunol. 12:923 (1994) and Eldridge et al., Sem. Hematol. 30:16 (1993)). Toxin-targeted delivery technologies, also known as receptor mediated targeting, such as those of Avant Immunotherapeutics, Inc. (Needham, Mass.) may also be used.

[0314] Vaccine compositions often include adjuvants. Many adjuvants contain a substance designed to protect the antigen from rapid catabolism, such as aluminum hydroxide or mineral oil, and a stimulator of immune responses, such as lipid A, Bortadella pertussis or Mycobacterium tuberculosis derived proteins. Certain adjuvants are commercially available as, e.g., Freund's Incomplete Adjuvant and Complete Adjuvant (Difco Laboratories, Detroit, Mich.); Merck Adjuvant 65 (Merck and Company, Inc., Rahway, N.J.); AS-2 (SmithKline Beecham, Philadelphia, Pa.); aluminum salts such as aluminum hydroxide gel (alum) or aluminum phosphate; salts of calcium, iron or zinc; an insoluble suspension of acylated tyrosine; acylated sugars; cationically or anionically derivatized polysaccharides; polyphosphazenes; biodegradable microspheres; monophosphoryl lipid A and quil A. Cytokines, such as GM-CSF, interleukin-2, -7, -12, and other like growth factors, may also be used as adjuvants.

[0315] Vaccines can be administered as nucleic acid compositions wherein DNA or RNA encoding one or more of the polypeptides, or a fragment thereof, is administered to a patient. This approach is described, for instance, in Wolff et. al., Science 247:1465 (1990) as well as U.S. Pat. Nos. 5,580,859; 5,589,466; 5,804,566; 5,739,118; 5,736,524; 5,679,647; WO 98/04720, each of which is hereby incorporated by reference herein.; and in more detail below. Examples of DNA-based delivery technologies include “naked DNA”, facilitated (bupivicaine, polymers, peptide-mediated) delivery, cationic lipid complexes, and particle-mediated (“gene gun”) or pressure-mediated delivery (see, e.g., U.S. Pat. No. 5,922,687, which is hereby incorporated by reference herein.).

[0316] For therapeutic or prophylactic immunization purposes, the peptides of the invention can be expressed by viral or bacterial vectors. Examples of expression vectors include attenuated viral hosts, such as vaccinia or fowlpox. This approach involves the use of vaccinia virus, e.g., as a vector to express nucleotide sequences that encode metastatic breast cancer or metastatic lung cancer polypeptides or polypeptide fragments. Upon introduction into a host, the recombinant vaccinia virus expresses the immunogenic peptide, and thereby elicits an immune response. Vaccinia vectors and methods useful in immunization protocols are described in, e.g., U.S. Pat. No. 4,722,848, which is hereby incorporated by reference herein. Another vector is BCG (Bacille Calmette Guerin). BCG vectors are described in Stover et al., Nature 351:456-460 (1991). A wide variety of other vectors useful for therapeutic administration or immunization e.g., adeno and adeno-associated virus vectors, retroviral vectors, Salmonella typhi vectors, detoxified anthrax toxin vectors, and the like, will be apparent to those skilled in the art from the description herein (see, e.g., Shata et al., Mol Med Today 6:66-71 (2000); Shedlock et al., J Leukoc Biol 68:793-806 (2000); Hipp et al., In Vivo 14:571-85 (2000)).

[0317] Methods for the use of genes as DNA vaccines are well known, and include placing a metastatic breast cancer or metastatic lung cancer gene or portion of a metastatic breast cancer or metastatic lung cancer gene under the control of a regulatable promoter or a tissue-specific promoter for expression in a metastatic breast cancer or metastatic lung cancer patient. The metastatic breast cancer or metastatic lung cancer gene used for DNA vaccines can encode full-length metastatic breast cancer or metastatic lung cancer proteins, but more preferably encodes portions of the metastatic breast cancer or metastatic lung cancer proteins including peptides derived from the metastatic breast cancer or metastatic lung cancer protein. In one embodiment, a patient is immunized with a DNA vaccine comprising a plurality of nucleotide sequences derived from a metastatic breast cancer or metastatic lung cancer gene. For example, metastatic breast cancer or metastatic lung cancer-associated genes or sequence encoding subfragments of a metastatic breast cancer or metastatic lung cancer protein are introduced into expression vectors and tested for their immunogenicity in the context of Class I MHC and an ability to generate cytotoxic T cell responses. This procedure provides for production of cytotoxic T cell responses against cells which present antigen, including intracellular epitopes.

[0318] In a preferred embodiment, the DNA vaccines include a gene encoding an adjuvant molecule with the DNA vaccine. Such adjuvant molecules include cytokines that increase the immunogenic response to the metastatic breast cancer or metastatic lung cancer polypeptide encoded by the DNA vaccine. Additional or alternative adjuvants are available.

[0319] In another preferred embodiment metastatic breast cancer or metastatic lung cancer genes find use in generating animal models of metastatic breast cancer or metastatic lung cancer. When the metastatic breast cancer or metastatic lung cancer gene identified is repressed or diminished in metastatic tissue, gene therapy technology, e.g., wherein antisense RNA directed to the metastatic breast cancer or metastatic lung cancer gene will also diminish or repress expression of the gene. Animal models of metastatic breast cancer or metastatic lung cancer find use in screening for modulators of a metastatic breast cancer or metastatic lung cancer-associated sequence or modulators of metastatic breast cancer or metastatic lung cancer. Similarly, transgenic animal technology including gene knockout technology, e.g., as a result of homologous recombination with an appropriate gene targeting vector, will result in the absence or increased expression of the metastatic breast cancer or metastatic lung cancer protein. When desired, tissue-specific expression or knockout of the metastatic breast cancer or metastatic lung cancer protein may be necessary.

[0320] It is also possible that the metastatic breast cancer or metastatic lung cancer protein is overexpressed in metastatic breast cancer or metastatic lung cancer. As such, transgenic animals can be generated that overexpress the metastatic breast cancer or metastatic lung cancer protein. Depending on the desired expression level, promoters of various strengths can be employed to express the transgene. Also, the number of copies of the integrated transgene can be determined and compared for a determination of the expression level of the transgene. Animals generated by such methods find use as animal models of metastatic breast cancer or metastatic lung cancer and are additionally useful in screening for modulators to treat metastatic breast cancer or metastatic lung cancer.

### Kits for Use in Diagnostic and/or Prognostic Applications

[0321] For use in diagnostic, research, and therapeutic applications suggested above, kits are also provided by the invention. In the diagnostic and research applications such kits may include any or all of the following: assay reagents, buffers, metastatic breast cancer or metastatic lung cancer-specific nucleic acids or antibodies, hybridization probes and/or primers, antisense polynucleotides, ribozymes, dominant negative metastatic breast cancer or metastatic lung cancer polypeptides or polynucleotides, small molecules inhibitors of metastatic breast cancer or metastatic lung cancer-associated sequences etc. A therapeutic product may include sterile saline or another pharmaceutically acceptable emulsion and suspension base.

[0322] In addition, the kits may include instructional materials containing directions (i.e., protocols) for the practice of the methods of this invention. While the instructional materials typically comprise written or printed materials they are not limited to such. Any medium capable of storing such instructions and communicating them to an end user is contemplated by this invention. Such media include, but are not limited to electronic storage media (e.g., magnetic discs, tapes, cartridges, chips), optical media (e.g., CD ROM), and the like. Such media may include addresses to internet sites that provide such instructional materials.

[0323] The present invention also provides for kits for screening for modulators of metastatic breast cancer or metastatic lung cancer-associated sequences. Such kits can be prepared from readily available materials and reagents. For example, such kits can comprise one or more of the following materials: a metastatic breast cancer or metastatic lung cancer- associated polypeptide or polynucleotide, reaction tubes, and instructions for testing metastatic breast cancer or metastatic lung cancer-associated activity. Optionally, the kit contains biologically active metastatic breast cancer or metastatic lung cancer protein. A wide variety of kits and components can be prepared according to the present invention, depending upon the intended user of the kit and the particular needs of the user. Diagnosis would typically involve evaluation of a plurality of genes or products. The genes will be selected based on correlations with important parameters in disease which may be identified in historical or outcome data.
[0324] Table 1A shows about 461 genes upregulated in breast metastases to the brain relalve to normal breast tissues. These genes were selected from 59680 probesets on the Eos/Affymetrix Hu03 Genechip array. Gene expression data for each probeset obtained from this analysis was expressed as average intensity (Al), a normalized value reflecting the relative level of mRNA expression.
[0325] Table 2A shows about 445 genes upregulated in breast metastases to the brain relatve to normal body tissues. These genes were selected from 59680 probesets on the Eos/Affymetrix Hu03 Genechip array. Gene expression data for each probeset obtained from this analysis was expressed as average intensity (Al), a normalized value reflecting the relative level of mRNA expression.
[0326] Table 3A shows about 216 genes upregulated in breast metastases to the brain relative to primary breast tumors. These genes were selected from 59680 probesets on the Eos/Affymetrix Hu03 Genechip array. Gene expression data for each probeset obtained from this analysis was expressed as average intensity (Al), a normalized value reflecting the relative level of mRNA expression.
[0327] Table 4A shows about 350 genes downregulated in breast metastases to the brain relaive to primary breast tumors. These genes were selected from 59680 probesets on the Eos/Affymetrix Hu03 Genechip array. Gene expression data for each probeset obtained from this analysis was expressed as average intensity (Al), a normalized value reflecting the relative level of mRNA expression.
[0328] Table 5A shows about 489 genes downregulated in breast metastases to the brain relative to normal breast tissue. These genes were selected from 59680 probesets on the Eos/Affymetrix Hu03 Genechip array. Gene expression data for each probeset obtained from this analysis was expressed as average intensity (Al), a normalized value reflecting the relative level of mRNA expression.
[0329] Table 6A shows about 1251 genes upregulated in lung metastases to the brain relaive to normal lung tissues. These genes were selected from 59680 probesets on the Eos/Affymetrix Hu03 Genechip array. Gene expression data for each probeset obtained from this analysis was expressed as average intensity (Al), a normalized value reflecting the relative level of mRNA expression.
[0330] Table 7A shows about 381 genes upregulated in lung metastases to the brain relaive to normal body tissues. These genes were selected from 59680 probesets on the Eos/Affymetrix Hu03 Genechip array. Gene expression data for each probeset obtained from this analysis was expressed as average intensity (Al), a normalized value refleting the relative level of mRNA expression.
[0331] Table 8A shows about 330 genes upregulated in lung metastases to the brain relaive to pomary lung tumors. These genes were selected from 59680 probesets on the Eos/Affymetrix Hu03 Genechip array. Gene expression data for each probeset obtained from this analysis was expressed as average intensity (Al), a normalized value refleting the relative level of mRNA expression.
[0332] Table 9A shows about 252 genes downregulated in lung metastases to the brain relaive to primary lung tumors. These genes were selected from 59680 probesets on the Eos/Affymetrix Hu03 Genechip array. Gene expression data for each probeset obtained from this analysis was expressed as average intensity (Al), a normalized value refleting the relative level of mRNA expression.
[0333] Table 10A shows about 289 genes downregulated in lung metastases to the brain relative to normal lung tissue. These genes were selected from 59680 probesets on the Eos/Affymetrix Hu03 Genechip array. Gene expression data for each probeset obtained from this analysis was expressed as average intensity (Al), a norrmalized value refleting the relative level of mRNA expression.
[0334] Table 11A shows about 1198 genes upregulated in breast and lung metastases to the brain relative to normal body tissues. These genes were selected from 59680 probesets on the Ecos/Affymetix Hu03 Genechip array. Gene expression data for each probeset obtained from this analysis was expressed as average intensity (Al), a normalized value refleting the relative level of mRNA expression.
[0335] Table 12A shows about 2867 genes upregulated in breast and lung metastases to the brain relative to normal breast and lung tissues. These genes were selected from 59680 probesets on the Eos/Affymetrix Hu03 Genechip array. Gene expression data for each probeset obtained from this analysis was expressed as average intensity (Al), a normalized value reflecting the relative level of mRNA expression.
[0336] Table 1B-12C shows the accession numbers for those pkeys in Tables 1A-12A lacking unigenelD's. For each probeset we have listed the gene cluter number from which the oligonucleotides were designed. Gene clusters were compiled using sequences derived from Genbank ESTs and mRNAs. These sequences were clustered based on sequence similary using Clustering and Alignment Tools (DoubleTwist, Oakland Calif.). The Genbank accession numbers for sequences comprising each cluster are listed in the Accessoin column.

[0337] Tables 1C-12C shows genomic positioning for those pkeys lacking unigene ID's and accession numbers in tables 1A-12A. For each predicted exon, we have listed the genomic sequence source used for prediction. Nucleotide locations of each predicted exon are also listed.

TABLE 1A
About 461 genes upregulated in breast metastases to the brain relative to normal breast tissues

| Pkey | ExAccn | UniGeneID | UniGene Title | R1 | SEQ ID NO(s): |
|---|---|---|---|---|---|
| 419741 | NM_007019 | Hs.93002 | ubiquitin carrier protein E2-C | 23.16 | 1355 5056 |
| 420542 | NM_000505 | Hs.1321 | coagulation factor XII (Hageman factor) | 18.65 | 1428 5080 |
| 407014 | U38268 | | gb: Human cytochrome b pseudogene, partia | 17.68 | 118 |
| 405452 | | | Target Exon | 16.40 | |
| 417900 | BE250127 | Hs.82906 | CDC20 (cell division cycle 20, S. cerevi | 14.23 | 1136 |
| 419078 | M93119 | Hs.89584 | insulinoma-associated 1 | 14.05 | 1272 5036 |
| 421693 | X71490 | Hs.106876 | ATPase, H transporting, lysosomal (vacuo | 13.45 | 1555 5120 |
| 422765 | AW409701 | Hs.1578 | baculoviral IAP repeat-containing 5 (sur | 12.17 | 1680 |
| 408908 | BE296227 | Hs.250822 | serine/threonine kinase 15 | 11.78 | 317 |
| 410407 | X66839 | Hs.63287 | carbonic anhydrase IX | 11.66 | 474 4846 |
| 418836 | AI655499 | Hs.161712 | BMP-R1B | 11.53 | 1247 |
| 419875 | AA853410 | Hs.93557 | proenkephalin | 10.59 | 1365 |
| 412513 | AA322599 | Hs.5163 | ESTs, Weakly similar to AF151840 1 CGI-8 | 10.50 | 640 |
| 400205 | | | NM_006265*: Homo sapiens RAD21 (S. pombe) | 10.40 | 1 4680 |
| 443426 | AF098158 | Hs.9329 | chromosome 20 open reading frame 1 | 10.28 | 3523 5627 |
| 426842 | NM_004210 | Hs.172700 | neuralized (Drosophila)-like | 10.07 | 2106 5324 |
| 414358 | AA476456 | Hs.142614 | ESTs | 10.05 | 815 |
| 427324 | AA159587 | Hs.285932 | hypothetical protein FLJ23322 | 9.90 | 2142 |
| 431070 | AW408164 | Hs.249184 | transcription factor 19 (SC1) | 9.68 | 2529 |
| 425397 | J04088 | Hs.156346 | topoisomerase (DNA) II alpha (170 kD) | 9.53 | 1959 5261 |
| 430375 | AW371048 | Hs.93758 | H4 histone family, member H | 9.36 | 2477 |
| 417308 | H60720 | Hs.81892 | KIAA0101 gene product | 9.35 | 1079 |
| 429503 | AA394183 | Hs.204166 | ESTs | 9.35 | 2381 |
| 432178 | BE265369 | Hs.272814 | hypothetical protein DKFZp434E1723 | 9.33 | 2639 |
| 444371 | BE540274 | Hs.239 | forkhead box M1 | 9.14 | 3592 |
| 407777 | AA161071 | Hs.71465 | squalene epoxidase | 9.09 | 194 |
| 414907 | X90725 | Hs.77597 | polo (Drosophia)-like kinase | 8.73 | 4933 891 |
| 430294 | AI538226 | Hs.32976 | guanine nucleotide binding protein 4 | 8.52 | 2463 |
| 400914 | | | ENSP00000228091*: Calcium-binding protein | 8.50 | |
| 423198 | M81933 | Hs.1634 | cell division cycle 25A | 8.49 | 1727 5174 |
| 434916 | AF161383 | Hs.284207 | Homo sapiens, Similar to RIKEN cDNA 1110 | 8.30 | 2879 5558 |
| 447342 | AI199268 | Hs.19322 | Homo sapiens, Similar to RIKEN cDNA 2010 | 8.12 | 3845 |
| 400292 | AA250737 | Hs.72472 | BMP-R1B (bone morphogenetic protein rec | 8.07 | 6 |
| 419390 | AI701162 | Hs.90207 | hypothetical protein MGC11138 | 7.98 | 1309 |
| 403532 | | | NM_024638: Homo sapiens hypothetical prot | 7.97 | 46 4715 |
| 402542 | | | Target Exon | 7.97 | |
| 422799 | AI933199 | Hs.120911 | neurexophilin 4 | 7.95 | 1682 |
| 421506 | BE302796 | Hs.105097 | thymidine kinase 1, soluble | 7.79 | 1528 |
| 436877 | AA931484 | Hs.121255 | ESTs, Weakly similar to T21069 hypotheti | 7.73 | 3017 |
| 414432 | BE378174 | Hs.26506 | Homo sapiens clone CDABP0005 mRNA sequen | 7.56 | 829 |
| 406690 | M29540 | Hs.220529 | carcinoembryonic antigen-related cell ad | 7.56 | 4748 86 |
| 428865 | BE544095 | Hs.164960 | BarH-like homeobox 1 | 7.54 | 2314 |
| 437929 | T09353 | Hs.106642 | ESTs, Weakly similar to T09052 hypotheti | 7.50 | 3108 |
| 411006 | AW813193 | Hs.17767 | KIAA1554 protein | 7.43 | 526 |
| 453439 | AI572438 | Hs.32976 | guanine nucleotide binding protein 4 | 7.40 | 4406 |
| 451930 | BE259124 | Hs.27262 | Homo sapiens clone 25110 mRNA sequence | 7.40 | 4257 |
| 448409 | AW069807 | Hs.134726 | ESTs, Moderately similar to PC4259 ferri | 7.37 | 3966 |
| 412140 | AA219691 | Hs.73625 | RAB6 interacting, kinesin-like (rabkines | 7.36 | 613 |
| 433272 | AB043585 | Hs.100890 | candidate mediator of the p53-dependent | 7.34 | 2752 5534 |
| 457465 | AW301344 | Hs.122908 | DNA replication factor | 7.33 | 4592 |
| 422961 | Y13620 | Hs.122607 | B-cell CLL/lymphoma 9 | 7.29 | 1700 5163 |
| 436876 | AI124756 | Hs.5337 | isocitrate dehydrogenase 2 (NADP), mitoc | 7.26 | 3016 |
| 401451 | | | NM_004496*: Homo sapiens hepatocyte nucle | 7.24 | 27 4697 |
| 457211 | AW972565 | Hs.32399 | ESTs, Weakly similar to S51797 vasodilat | 7.16 | 4583 |
| 429353 | AL117406 | Hs.335891 | ATP-binding cassette transporter MRP8 | 7.14 | 2359 |
| 451346 | NM_006338 | Hs.26312 | glioma amplified on chromosome 1 protein | 7.12 | 4213 5743 |
| 428648 | AF052728 | Hs.188021 | potassium voltage-gated channel, subfami | 7.10 | 2279 5369 |
| 453028 | AB006532 | Hs.31442 | RecQ protein-like 4 | 7.07 | 4368 5768 |
| 423551 | AA327598 | Hs.89633 | ESTs | 7.07 | 1757 |
| 453968 | AA847843 | Hs.62711 | High mobility group (nonhistone chromoso | 7.00 | 4456 |
| 421487 | AF027406 | Hs.104865 | serine/threonine kinase 23 | 6.98 | 1526 5109 |
| 425371 | D49441 | Hs.155981 | mesothelin | 6.96 | 1957 5259 |
| 443347 | AI052543 | Hs.133244 | melanoma-derived leucine zipper, extra-n | 6.95 | 3519 |
| 421458 | NM_003654 | Hs.104576 | carbohydrate (keratan sulfate Gal-6) sul | 6.84 | 1521 5107 |
| 402265 | | | Target Exon | 6.82 | |
| 432180 | Y18418 | Hs.272822 | RuvB (E coli homolog)-like 1 | 6.70 | 2640 5502 |
| 403291 | | | Target Exon | 6.67 | |
| 412856 | BE386745 | Hs.74631 | basigin (OK blood group) | 6.66 | 678 |
| 453392 | U23752 | Hs.32964 | SRY (sex determining region Y)-box 11 | 6.65 | 4403 5776 |
| 401076 | | | C11000393: gi\|7305361\|ref\|NP_038652.1\|ot | 6.65 | |
| 428484 | AF104032 | Hs.184601 | solute carrier family 7 (cationic amino | 6.64 | 2265 5364 |
| 422296 | AA360231 | Hs.114416 | Homo sapiens , Similar to transducin (bet | 6.64 | 1629 |
| 427914 | AA417350 | Hs.20575 | ESTs | 6.59 | 2204 |
| 436291 | BE568452 | Hs.344037 | protein regulator of cytokinesis 1 | 6.57 | 2975 |
| 414064 | BE245289 | Hs.16165 | expressed in activated T/LAK lymphocytes | 6.56 | 784 |
| 402907 | | | NM_024777*: Homo sapiens hypothetical pro | 6.55 | |
| 458814 | AI498957 | Hs.170861 | ESTs, Weakly similar to Z195_HUMAN ZINC | 6.55 | 4638 |
| 426686 | AI362802 | Hs.171814 | parathymosin | 6.52 | 2087 |
| 402078 | | | Target Exon | 6.47 | |
| 407168 | R45175 | Hs.117183 | ESTs | 6.46 | 131 |
| 426553 | AA381293 | Hs.23598 | ESTs | 6.45 | 2077 |
| 403988 | | | C5001831: gi\|11056014\|ref\|NP_067651.1\|ac | 6.40 | |
| 452969 | W92792 | Hs.77575 | hypothetical protein MGC3136 | 6.37 | 4361 |
| 402961 | | | Homo sapiens mRNA; cDNA DKFZp761E0611 (f | 6.33 | |
| 422938 | NM_001809 | Hs.1594 | centromere protein A (17 kD) | 6.32 | 1694 5162 |
| 402217 | | | C19001662*: gi\|6753872\|ref\|NP_034345.1\|i | 6.32 | |
| 432221 | M21191 | Hs.273415 | aldolase A, fructose-bisphosphate | 6.30 | 2644 |
| 443723 | AI144442 | Hs.157144 | syntaxin 6 | 6.27 | 3545 |
| 419081 | AI798863 | Hs.87191 | ESTs | 6.27 | 1273 |
| 402649 | | | Target Exon | 6.20 | |
| 400183 | | | Eos Control | 6.20 | |
| 415262 | H95572 | Hs.206521 | YME1 (S. cerevisiae)-like 1 | 6.09 | 919 |
| 421582 | AI910275 | | trefoil factor 1 (breast cancer, extroge | 6.08 | 1541 |
| 405046 | | | C3000978: gi\|9280045\|dbj\|BAB01579.1\| (AB0 | 6.08 | |
| 409015 | BE389387 | Hs.49767 | NM_004553: Homo sapiens NADH dehydrogenas | 6.06 | 323 |
| 424047 | AI868401 | Hs.138248 | hypothetical protein YH95C04 | 6.05 | 1795 |
| 420005 | AW271106 | Hs.133294 | ESTs | 6.03 | 1372 |
| 403026 | | | Target Exon | 6.03 | |
| 430532 | D61216 | Hs.18672 | ESTs | 6.02 | 2494 |
| 430167 | Y08976 | Hs.234759 | FEV protein | 6.02 | 2448 5437 |
| 421242 | AW161386 | Hs.13561 | hypothetical protein MGC4692 | 6.01 | 1494 |
| 427239 | BE270447 | | ubiquitin carrier protein | 5.99 | 2134 |
| 447946 | AI566164 | Hs.277445 | ESTs | 5.97 | 3923 |
| 449722 | BE280074 | Hs.23960 | cyclin B1 | 5.95 | 4079 |
| 423226 | AA323414 | Hs.146109 | ESTs, Weakly similar to T28937 hypotheti | 5.94 | 1729 |
| 439963 | AW247529 | Hs.6793 | platelet-activating factor acetylhydrola | 5.92 | 3250 |
| 445470 | AI239871 | Hs.154758 | ESTs | 5.91 | 3677 |
| 403804 | | | Target Exon | 5.90 | |
| 428450 | NM_014791 | Hs.184339 | KIAA0175 gene product | 5.89 | 2259 5359 |
| 406947 | L10403 | Hs.3134 | DNA-binding protein amplifying expressio | 5.85 | 113 4759 |
| 418951 | F07809 | Hs.89506 | paired box gene 6 (aniridia, keratitis) | 5.85 | 1262 |
| 406137 | | | NM_000179*: Homo sapiens mutS (E. coli) h | 5.79 | 4742 76 |
| 414416 | AW409985 | Hs.76084 | hypothetical protein MGC2721 | 5.78 | 824 |
| 415539 | AI733881 | Hs.72472 | BMP-R1B (bone morphogenetic protein rec | 5.77 | 935 |
| 441761 | AI222880 | | gb: qp40c06.x1 NCI_CGAP_Co8 Homo sapiens | 5.77 | 3371 |
| 449644 | AW960707 | Hs.148324 | ESTs | 5.77 | 4072 |
| 429901 | AK000502 | Hs.56237 | hypothetical protein FLJ20495 | 5.75 | 2424 5429 |
| 418526 | BE019020 | Hs.85838 | solute carrier family 16 (monocarboxylic | 5.75 | 1211 |
| 421625 | AA405386 | Hs.178004 | ESTs | 5.74 | 1545 |
| 405146 | | | C8001690*: gi\|6754446\|ref\|NP_034760.1\|ki | 5.66 | |
| 424441 | X14850 | Hs.147097 | H2A histone family, member X | 5.65 | 1846 5212 |
| 443792 | AI763073 | Hs.204873 | ESTs | 5.63 | 3553 |
| 457341 | BE181716 | | gb: QV1-HT0639-150500-198-e03 HT0639 Homo | 5.62 | 4588 |
| 403384 | | | C4000351*: gi\|8394456\|ref\|NP_059138.1\|to | 5.62 | |
| 408157 | AA047685 | Hs.62946 | ESTs | 5.60 | 239 |
| 405968 | | | Target Exon | 5.60 | |
| 407701 | AW375009 | Hs.164407 | ESTs | 5.58 | 183 |
| 432917 | NM_014125 | Hs.241517 | PRO0327 protein | 5.57 | 2712 5518 |
| 422168 | AA586894 | Hs.112408 | S100 calcium-binding protein A7 (psorias | 5.56 | 1612 |
| 418322 | AA284166 | Hs.84113 | cyclin-dependent kinase inhibitor 3 (CDK | 5.55 | 1184 |
| 433157 | AW769671 | | ESTs, Moderately similar to CBX4_HUMAN C | 5.55 | 2741 |
| 400222 | | | NM_002082*: Homo sapiens G protein-couple | 5.54 | 3 4682 |
| 419444 | NM_002496 | Hs.90443 | Target CAT | 5.54 | 1314 5048 |
| 421937 | AI878857 | Hs.109706 | hematological and neurological expressed | 5.54 | 1582 |
| 441153 | BE562826 | | gb: 601336534F1 NIH_MGC_44 Homo sapiens c | 5.53 | 3336 |
| 429671 | BE379335 | Hs.211594 | proteasome (prosome, macropain) 26S subu | 5.53 | 2405 |
| 407242 | M18728 | | gb: Human nonspecific crossreacting antig | 5.53 | 142 4766 |
| 429469 | M64590 | Hs.27 | glycine dehydrogenase (decarboxylating; | 5.53 | 2374 5408 |
| 400340 | AJ223798 | | homeo box 11-like 2 | 5.53 | 13 4686 |
| 405467 | | | Target Exon | 5.50 | |
| 426081 | M69238 | Hs.166172 | aryl hydrocarbon receptor nuclear transI | 5.49 | 2023 5288 |
| 404321 | NA | | C7001741*: gi\|2499629\|sp\|Q63932\|MPK2_MOUS | 5.49 | |
| 439573 | AW137640 | Hs.231444 | Homo sapiens, Similar to hypothetical pr | 5.48 | 3218 |
| 437433 | R74016 | Hs.121581 | ESTs | 5.47 | 3064 |
| 440475 | AI807671 | Hs.24040 | potassium channel, subfamily K, member 3 | 5.46 | 3291 |
| 438552 | AJ245820 | Hs.6314 | type I transmembrane receptor (seizure-r | 5.42 | 3148 5596 |
| 403882 | | | Target Exon | 5.42 | |
| 411734 | AW374954 | Hs.71779 | Homo sapiens DNA from chromosome 19, cos | 5.40 | 572 |
| 412377 | AW947540 | | gb: RC0-MT0002-140300-011-g10 MT0002 Homo | 5.38 | 627 |
| 432562 | BE531048 | Hs.278422 | DKFZP586G1122 protein | 5.38 | 2680 |
| 411358 | R47479 | Hs.94761 | KIAA1691 protein | 5.38 | 548 |
| 416361 | AW204907 | Hs.6872 | ESTs, Weakly similar to CA13_HUMAN COLLA | 5.37 | 989 |
| 418514 | AW068487 | Hs.25413 | TOLLIP protein | 5.37 | 1209 |
| 443537 | D13305 | Hs.203 | cholecystokinin B receptor | 5.35 | 3528 5629 |
| 445329 | AW206378 | Hs.144809 | ESTs | 5.35 | 3670 |
| 452700 | AI859390 | Hs.288940 | five-span transmembrane protein M83 | 5.34 | 4336 |
| 438364 | AK000860 | Hs.6191 | hypothetical protein DKFZp7621166 | 5.33 | 3135 |
| 408901 | AK001330 | Hs.48855 | hypothetical protein FLJ10468 | 5.33 | 316 4808 |
| 447836 | F11364 | | gb: HSC2VH051 normalized infant brain cDN | 5.29 | 3912 |
| 442790 | AW663221 | Hs.159057 | ESTs | 5.27 | 3470 |
| 408310 | AW179023 | Hs.191705 | gb: PM3-ST0036-170899-001-e08 ST0036 Homo | 5.27 | 254 |
| 407792 | AI077715 | Hs.39384 | putative secreted ligand homologous to f | 5.26 | 196 |
| 413597 | AW302885 | Hs.117183 | ESTs | 5.26 | 739 |
| 430636 | Z83737 | Hs.247696 | H3 histone family, member J | 5.23 | 2500 5460 |
| 437673 | AW665665 | Hs.153034 | ESTs | 5.22 | 3081 |
| 413278 | BE563085 | Hs.833 | interferon-stimulated protein, 15 kDa | 5.20 | 705 |
| 418004 | U37519 | Hs.87539 | aldehyde dehydrogenase 3 family, member | 5.19 | 1145 4997 |
| 402990 | | | Target Exon | 5.19 | |
| 450278 | AW205234 | Hs.201587 | ESTs | 5.18 | 4123 |
| 411678 | AI907114 | Hs.71465 | squalene epoxidase | 5.16 | 568 |
| 453160 | AI263307 | | H2B histone family, member L | 5.16 | 4380 |
| 444734 | NM_001360 | Hs.11806 | 7-dehydrocholesterol reductase | 5.15 | 3622 5644 |
| 429451 | BE409861 | Hs.202833 | heme oxygenase (decycling) 1 | 5.14 | 2372 |
| 405501 | | | Target Exon | 5.14 | |
| 427560 | AA405394 | Hs.161851 | ESTs | 5.13 | 2166 |
| 428301 | AW628666 | Hs.98440 | ESTs, Weakly similar to I38022 hypotheti | 5.13 | 2238 |
| 402586 | | | ENSP00000241318*: DJ947L8.1.1 (novel CUB | 5.13 | |
| 428566 | U41763 | Hs.184916 | clathrin, heavy polypeptide-like 1 | 5.12 | 2271 5365 |
| 401612 | | | C4000495: gi\|6677633\|ref\|NP_033595.1\|zin | 5.11 | |
| 404120 | | | C5000537*: gi\|3298595\|gb\|AAC41376.1\| (AF0 | 5.10 | |
| 405850 | | | Target Exon | 5.10 | |
| 433055 | AF073727 | Hs.279953 | EH domain-binding mitotic phosphoprotein | 5.09 | 2729 |
| 405210 | | | ENSP00000244302*: CDNA FLJ11591 fis, clon | 5.07 | |
| 455416 | AW937143 | | gb: PM1-DT0041-281299-001-f01 DT0041 Homo | 5.07 | 4507 |
| 428182 | BE386042 | Hs.293317 | ESTs, Weakly similar to GGC1_HUMAN G ANT | 5.05 | 2227 |
| 407239 | AA076350 | Hs.67846 | leukocyte immunoglobulin-like receptor, | 5.03 | 141 |
| 449162 | AI632740 | Hs.10476 | ESTs | 5.02 | 4041 |
| 434203 | BE262677 | Hs.283558 | hypothetical protein PRO1855 | 5.02 | 2820 |
| 434567 | AK000600 | Hs.3972 | NeuAc-alpha-2,3-Gal-beta-1,3-GalNAc-alph | 5.02 | 2848 5550 |
| 433113 | AA622130 | Hs.152524 | ESTs, Weakly similar to PGCB MOUSE BREVI | 5.00 | 2736 |
| 432504 | AL121015 | Hs.277704 | oxygen regulated protein (150 kD) | 4.99 | 2675 |
| 431667 | AA812573 | Hs.246787 | ESTs | 4.99 | 2581 |
| 428970 | BE276891 | Hs.194691 | retinoic acid induced 3 (RAIG1); metabo | 4.99 | 2321 |
| 416700 | AW498958 | Hs.343475 | cathepsin D (lysosomal aspartyl protease | 4.99 | 1014 |
| 446230 | AA134486 | Hs.7155 | ESTs, Moderately similar to 2115357A TYK | 4.98 | 3737 |
| 434637 | AF147432 | Hs.176926 | ESTs | 4.97 | 2857 |
| 453857 | AL080235 | Hs.35861 | Ras-induced senescence 1 (RIS1) | 4.97 | 4437 5785 |
| 429438 | AC006293 | | Homo sapiens killer cell lg-like recepto | 4.95 | 2369 5406 |
| 414222 | AL135173 | Hs.878 | sorbitol dehydrogenase | 4.95 | 805 |
| 423541 | AA296922 | Hs.129778 | serine protease inhibitor, Kazal type 4 | 4.94 | 1756 |
| 422095 | AI868872 | Hs.282804 | hypothetical protein FLJ22704 | 4.93 | 1603 |
| 453885 | AW002629 | Hs.259220 | ESTs | 4.93 | 4445 |
| 426006 | R49031 | Hs.22627 | ESTs | 4.91 | 2019 |
| 405979 | | | Target Exon | 4.91 | |
| 433352 | AA376773 | | gb: EST89237 Small intestine I Homo sapie | 4.90 | 2758 |
| 453922 | AF053306 | Hs.36708 | budding uninhibited by benzimidazoles 1 | 4.90 | 4452 5789 |
| 447388 | AW630534 | Hs.76277 | Homo sapiens, clone MGC: 9381, mRNA, comp | 4.88 | 3854 |
| 412988 | BE046680 | | gb: hn42h03.x1 NCI_CGAP_RDF2 Homo sapiens | 4.88 | |
| 409310 | R88721 | Hs.164584 | ESTs | 4.88 | 360 |
| 436481 | AA379597 | Hs.5199 | HSPC150 protein similar to ubiquitin-con | 4.87 | 2988 |
| 406685 | M18728 | | gb: Human nonspecific crossreacting antig | 4.87 | 4745 83 |
| 429294 | AA095971 | Hs.198793 | Homo sapiens cDNA: FLJ22463 fis, clone H | 4.86 | 2351 |
| 418675 | AW299723 | Hs.87223 | bone morphogenetic protein receptor, typ | 4.86 | 1225 |
| 427715 | BE245274 | Hs.180428 | KIAA1181 protein | 4.86 | 2188 |
| 425443 | AW157547 | Hs.115329 | ESTs | 4.85 | 1964 |
| 402885 | | | Target Exon | 4.84 | |
| 407704 | BE315072 | Hs.78768 | malignant cell expression-enhanced gene/ | 4.84 | 184 |
| 437352 | AL353957 | Hs.284181 | hypothetical protein DKFZp434P0531 | 4.83 | 3060 5585 |
| 404790 | | | C12001707*: gi\|7305215\|ref\|NP_038599.1\|k | 4.82 | |
| 427747 | AW411425 | Hs.180655 | serine/threonine kinase 12 | 4.80 | 2193 |
| 450149 | AW969781 | Hs.132863 | Zic family member 2 (odd-paired Drosophi | 4.80 | 4106 |
| 412519 | AA196241 | Hs.73980 | troponin T1, skeletal, slow | 4.79 | 641 |
| 401281 | | | DKFZP586N2124 protein | 4.78 | |
| 432969 | AA780472 | Hs.335557 | ESTs | 4.78 | 2716 |
| 445075 | AI651827 | | ESTs | 4.78 | 3649 |
| 406981 | S71129 | | acetylcholinesterase (YT blood group) | 4.78 | 117 4761 |
| 409162 | H25530 | Hs.50868 | solute carrier family 22 (organic cation | 4.77 | 343 |
| 428405 | Y00762 | Hs.2266 | cholinergic receptor, nicotinic, alpha p | 4.77 | 2250 5357 |
| 452838 | U65011 | Hs.30743 | preferentially expressed antigen in mela | 4.76 | 4353 5765 |
| 453005 | AW055308 | Hs.31803 | ESTs, Weakly similar to N-WASP H. sapien | 4.76 | 4365 |
| 418203 | X54942 | Hs.83758 | CDC28 protein kinase 2 | 4.75 | 1169 5003 |
| 453712 | AW403791 | Hs.55067 | hypothetical protein MGC15437 | 4.75 | 4426 |
| 406718 | AA505525 | Hs.169476 | glyceraldehyde-3-phosphate dehydrogenase | 4.74 | 94 |
| 411598 | BE336654 | Hs.70937 | H3 histone family, member A | 4.73 | 562 |
| 431882 | NM_001426 | Hs.271977 | engrailed homolog 1 | 4.73 | 2612 5493 |
| 443219 | AI354669 | Hs.187461 | ESTs, Weakly similar to C29149 proline-r | 4.73 | 3509 |
| 438956 | W00847 | Hs.135056 | Human DNA sequence from clone RP5-850E9 | 4.73 | 3180 |
| 418960 | NM_004494 | Hs.89525 | hepatoma-derived growth factor (HDGF) | 4.72 | 1263 5034 |
| 457739 | AF161337 | Hs.283928 | Homo sapiens HSPC074 mRNA, partial cds | 4.71 | 4600 5815 |
| 412999 | BE046255 | | gb: hn38g10.x2 NCI_CGAP_RDF2 Homo sapiens | 4.70 | |
| 420856 | BE513294 | Hs.205736 | HLA class II region expressed gene KE2 | 4.69 | 1461 |
| 408633 | AW963372 | Hs.46677 | PRO2000 protein | 4.69 | 286 |
| 435602 | AF217515 | Hs.283532 | uncharacterized bone marrow protein BM03 | 4.69 | 2931 5567 |
| 435493 | AW135312 | Hs.117237 | ESTs | 4.68 | 2920 |
| 409469 | AW517236 | Hs.318393 | ESTs | 4.68 | 377 |
| 407137 | T97307 | | gb: ye53h05.s1 Soares fetal liver spleen | 4.67 | 128 |
| 444441 | AW613841 | Hs.301394 | hypothetical protein MGC3101 | 4.67 | 3598 |
| 410959 | AW811873 | | gb: RC2-ST0168-071299-013-h10 ST0168 Homo | 4.67 | 523 |
| 402504 | | | C1003823*: gi\|4826521\|emb\|CAB42853.1\| (AL | 4.67 | |
| 417037 | BE083936 | Hs.80976 | antigen identified by monoclonal antibod | 4.66 | 1056 |
| 433399 | N46406 | Hs.84700 | similar to phosphatidylcholine transfer | 4.65 | 2760 |
| 436057 | AJ004832 | Hs.5038 | neuropathy target esterase | 4.65 | 2960 5575 |
| 409034 | AI684149 | Hs.172035 | hypothetical protein similar to mouse HN | 4.65 | 325 |
| 422830 | AC007954 | Hs.121371 | hypothetical protein DKFZp434P0111 | 4.64 | 1685 5159 |
| 421975 | AW961017 | Hs.6459 | hypothetical protein FLJ11856 | 4.64 | 1587 |
| 419760 | AA668227 | Hs.316625 | gb: ab77e07.s1 Stratagene fetal retina 93 | 4.63 | 1359 |
| 400657 | | | Target Exon | 4.63 | |
| 425003 | AF119046 | Hs.154149 | apurinic/apyrimidinic endonuclease(APEX | 4.61 | 1909 5242 |
| 432241 | AI937060 | Hs.6298 | KIAA1151 protein | 4.61 | 2648 |
| 459010 | AA331438 | | gb: EST35269 Embryo, 8 week I Homo sapien | 4.61 | 4652 |
| 438577 | AA811184 | Hs.259785 | carnitine palmitoyltransferase I, liver | 4.61 | 3150 |
| 441593 | AA939228 | Hs.163412 | ESTs | 4.61 | 3359 |
| 440238 | AW451970 | Hs.155644 | paired box gene 2 | 4.61 | 3273 |
| 429883 | AI125209 | Hs.123848 | ESTs | 4.59 | 2421 |
| 428500 | AI815395 | Hs.184641 | fatty acid desaturase 2 | 4.59 | 2266 |
| 450029 | AW073380 | Hs.267963 | hypothetical protein FLJ10535 | 4.58 | 4098 |
| 436608 | AA628980 | Hs.192371 | down syndrome critical region protein DS | 4.58 | 2997 |
| 411263 | BE297802 | Hs.69360 | kinesin-like 6 (mitotic centromere-assoc | 4.58 | 544 |
| 403156 | | | C2001591: gi\|10566471\|dbj\|BAB15806.1\| (AB | 4.58 | |
| 437026 | AW976573 | | ESTs | 4.57 | 3029 |
| 403481 | | | Target Exon | 4.57 | |
| 432886 | BE159028 | Hs.279704 | chromatin accessibility complex 1 | 4.56 | 2708 |
| 450935 | BE514743 | | tumor suppressor deleted in oral cancer- | 4.55 | 4176 |
| 454425 | AW300927 | Hs.27192 | hypothetical protein dJ1057B20.2 | 4.55 | 4482 |
| 423306 | W88562 | Hs.108198 | ESTs | 4.55 | 1735 |
| 442505 | AW003775 | Hs.343822 | UDP-Gal: betaGlcNAc beta 1,4-galactosylt | 4.54 | 3436 |
| 429345 | R11141 | Hs.199695 | hypothetical protein | 4.53 | 2357 |
| 407300 | AA102616 | Hs.120769 | gb: zn43e07.s1 Stratagene HeLa cell s3 93 | 4.53 | 149 |
| 405333 | | | Target Exon | 4.53 | |
| 402808 | | | ENSP00000235229: SEMB. | 4.53 | |
| 429746 | AJ237672 | Hs.214142 | 5,10-methylenetetrahydrofolate reductase | 4.53 | 2412 5424 |
| 448604 | AI546830 | | gb: PN2.1_07_D12.r mynom, Homo sapiens cD | 4.52 | 3988 |
| 410156 | AA082005 | Hs.9634 | ESTs | 4.52 | 450 |
| 418216 | AA662240 | Hs.283099 | AF15q14 protein | 4.51 | 1171 |
| 459358 | T24769 | Hs.343627 | hypothetical protein FLJ12998 | 4.50 | 4666 |
| 426516 | BE262660 | Hs.170197 | glutamic-oxaloacetic transaminase 2, mit | 4.50 | 2074 |
| 440061 | BE396581 | | gb: 601288812F1 NIH_MGC_8 Homo sapiens CD | 4.50 | 3258 |
| 422997 | BE018212 | Hs.122908 | DNA replication factor | 4.50 | 1708 |
| 407376 | AA993138 | Hs.142287 | ESTs, Weakly similar to ALUF_HUMAN !!!! | 4.49 | 159 |
| 408877 | AA479033 | Hs.130315 | ESTs, Weakly similar to A47582 B-cell gr | 4.48 | 314 |
| 449256 | AA059050 | Hs.59847 | ESTs | 4.47 | 4051 |
| 428227 | AA321649 | Hs.2248 | small inducible cytokine subfamily B (Cy | 4.46 | 2231 |
| 439273 | AW139099 | Hs.269701 | ESTs | 4.46 | 3195 |
| 418758 | AW959311 | Hs.172012 | hypothetical protein DKFZp434J037 | 4.46 | 1237 |
| 417158 | AW965223 | Hs.110062 | complement-c1q tumor necrosis factor-rel | 4.45 | 1065 |
| 404157 | | | C6001170: gi\|6468391\|emb\|CAB61578.1\| (AL0 | 4.45 | |
| 421777 | BE562088 | Hs.108196 | HSPC037 protein | 4.45 | 1562 |
| 416555 | H63394 | Hs.334792 | ESTs | 4.44 | 1003 |
| 454422 | AW072328 | Hs.59728 | Homo sapiens mRNA; cDNA DKFZp566C0546 (f | 4.44 | 4481 |
| 442432 | BE093589 | Hs.38178 | hypothetical protein FLJ23468 | 4.44 | 3429 |
| 444118 | AA458542 | Hs.10326 | coatomer protein complex, subunit epsilo | 4.44 | 3576 |
| 407561 | BE313226 | Hs.94761 | KIAA1691 protein | 4.44 | 167 |
| 405101 | | | ENSP00000249234*: Zinc finger protein 92 | 4.43 | |
| 459709 | AA653774 | Hs.212084 | ESTs | 4.43 | 4679 |
| 452833 | BE559681 | Hs.30736 | KIAA0124 protein | 4.43 | 4351 |
| 440087 | W28969 | Hs.7718 | hypothetical protein FLJ22678 | 4.43 | 3260 |
| 453833 | AF090320 | Hs.35718 | cytochrome P450, subfamily VIIIB (sterol | 4.43 | 4435 5784 |
| 433145 | BE256247 | Hs.7740 | oxysterol binding protein-like 1 | 4.43 | 2739 |
| 408771 | AW732573 | Hs.47584 | potassium voltage-gated channel, delayed | 4.42 | 305 |
| 430820 | AF194815 | | immunoglobulin lambda variable 4-3 | 4.42 | 2516 5463 |
| 458756 | AW057910 | Hs.282185 | ESTs | 4.42 | 4636 |
| 432415 | T16971 | Hs.289014 | ESTs, Weakly similar to A43932 mucin 2 p | 4.41 | 2665 |
| 433001 | AF217513 | Hs.279905 | clone HQ0310 PRO0310p1 | 4.40 | 2719 5521 |
| 426691 | NM_006201 | Hs.171834 | PCTAIRE protein kinase 1 | 4.40 | 2088 5314 |
| 435579 | AI332373 | Hs.156924 | ESTs | 4.40 | 2930 |
| 402299 | | | Target Exon | 4.40 | |
| 439926 | AW014875 | Hs.137007 | ESTs | 4.40 | 3243 |
| 413762 | AW411479 | Hs.848 | FK506-binding protein 4 (59 kD) | 4.39 | 751 |
| 406181 | | | Target Exon | 4.39 | |
| 458098 | BE550224 | | metallothionein 1E (functional) | 4.38 | 4611 |
| 405573 | | | Target Exon | 4.37 | |
| 434761 | AW298777 | Hs.192155 | ESTs | 4.37 | 2864 |
| 424411 | NM_005209 | Hs.146549 | crystallin, beta A2 | 4.36 | 1841 5211 |
| 451827 | BE387187 | Hs.27184 | growth factor, erv1 (S. cerevisiae)-like | 4.36 | 4252 |
| 445013 | AF151022 | Hs.300224 | hypothetical protein | 4.36 | 3646 5649 |
| 446439 | D87437 | Hs.15087 | KIAA0250 gene product | 4.35 | 3750 5667 |
| 456604 | AW383770 | Hs.131878 | ESTs, Highly similar to S22745 serine/th | 4.35 | 4554 |
| 414423 | BE045599 | Hs.202612 | ESTs | 4.35 | 825 |
| 439602 | W79114 | Hs.58558 | ESTs | 4.35 | 3222 |
| 427584 | BE410293 | Hs.179718 | v-myb avian myeloblastosis viral oncogen | 4.35 | 2168 |
| 400530 | | | Target Exon | 4.35 | |
| 420352 | BE258835 | Hs.347540 | gb: 601117374F1 NIH_MGC_16 Homo sapiens c | 4.34 | 1416 |
| 402229 | | | mitochondrial ribosomal protein S2 | 4.33 | |
| 409902 | AI337658 | Hs.156351 | ESTs | 4.33 | 416 |
| 452012 | AA307703 | Hs.279766 | kinesin family member 4A | 4.33 | 4262 |
| 409557 | BE182896 | Hs.3686 | ESTs | 4.33 | 384 |
| 452092 | BE245374 | Hs.27842 | hypothetical protein FLJ11210 | 4.32 | 4268 |
| 456623 | AI084125 | Hs.108106 | transcription factor | 4.32 | 4555 |
| 430361 | AI033965 | Hs.239926 | sterol-C4-methyl oxidase-like | 4.31 | 2476 |
| 437150 | R51407 | Hs.77910 | 3-hydroxy-3-methylglutaryl-Coenzyme A sy | 4.31 | 3038 |
| 428619 | AK002140 | Hs.187378 | hypothetical protein FLJ11278 | 4.31 | 2277 5368 |
| 426902 | AI125334 | Hs.97408 | ESTs | 4.30 | 2110 |
| 421994 | BE542166 | | ESTs, Weakly similar to I78885 serine/th | 4.30 | 1590 |
| 407539 | X91103 | | gb: H. sapiens mRNA for Hr44 protein. | 4.30 | 166 4774 |
| 428977 | AK001404 | Hs.194698 | cyclin B2 | 4.29 | 2323 |
| 410348 | AW182663 | Hs.95469 | ESTs | 4.29 | 467 |
| 406355 | | | C5000598: gi\|2136258\|pir\|\|I59377 template | 4.28 | |
| 454033 | AF107457 | Hs.37035 | homeo box HB9 | 4.28 | 4461 |
| 444893 | AW249312 | Hs.12109 | WD40 protein Ciao1 | 4.28 | 3637 |
| 424796 | AW298244 | Hs.266195 | ESTs | 4.28 | 1887 |
| 410009 | AA079555 | Hs.146092 | ESTs | 4.28 | 428 |
| 401807 | | | C7001350: gi\|6578126\|gb\|AAF17706.1\|AF0496 | 4.28 | |
| 403347 | | | Target Exon | 4.27 | |
| 448296 | BE622756 | Hs.10949 | Homo sapiens cDNA FLJ14162 fis, clone NT | 4.26 | 3956 |
| 426613 | U96132 | Hs.171280 | hydroxyacyl-Coenzyme A dehydrogenase, ty | 4.26 | 2083 5313 |
| 447987 | BE621544 | Hs.157160 | hypothetical protein MGC2616 | 4.26 | 3932 |
| 406043 | | | Target Exon | 4.25 | |
| 439453 | BE264974 | Hs.6566 | thyroid hormone receptor interactor 13 | 4.25 | 3208 |
| 417207 | N92226 | Hs.338218 | ESTs | 4.25 | 1072 |
| 428971 | BE278404 | Hs.285813 | hypothetical protein FLJ11807 | 4.25 | 2322 |
| 404816 | | | ENSP00000251989*: DJ100N22.1 (NOVEL EGF-L | 4.25 | |
| 425662 | BE173463 | | proliferation-associated 2G4, 38 kD | 4.25 | 1983 |
| 419409 | AW297831 | Hs.143792 | hypothetical protein MGC2656 | 4.24 | 1312 |
| 458744 | AW445183 | | ESTs | 4.24 | 4634 |
| 452461 | N78223 | Hs.108106 | transcription factor | 4.24 | 4311 |
| 436241 | AI051175 | Hs.119594 | ESTs | 4.23 | 2970 |
| 404068 | | | Target Exon | 4.23 | |
| 441362 | BE614410 | Hs.23044 | RAD51 (S. cerevisiae) homolog (E coli Re | 4.22 | 3347 |
| 442916 | H15560 | Hs.131833 | ESTs | 4.22 | 3481 |
| 418897 | AW016578 | Hs.128630 | ESTs | 4.22 | 1256 |
| 410211 | NM_014347 | Hs.296365 | zinc finger protein | 4.22 | 456 4841 |
| 426989 | AI815206 | | ESTs | 4.21 | 2115 |
| 425184 | BE278288 | Hs.155048 | Lutheran blood group (Auberger b antigen | 4.20 | 1934 |
| 409757 | NM_001898 | Hs.123114 | cystatin SN | 4.20 | 403 4832 |
| 424991 | AA775471 | Hs.241467 | ESTs | 4.20 | 1904 |
| 438792 | AW291313 | Hs.254955 | ESTs | 4.20 | 3165 |
| 452369 | AA766459 | | gb: oa32f07.s1 NCI_CGAP_GCB1 Homo sapiens | 4.20 | 4301 |
| 429873 | AW268693 | Hs.105713 | ESTs | 4.20 | 2420 |
| 454171 | AW854832 | | gb: QV2-CT0261-201099-011-f05 CT0261 Homo | 4.20 | |
| 418317 | R59783 | | gb: yh07f05.r1 Soares infant brain 1NIB H | 4.19 | 1181 |
| 414362 | AI347934 | Hs.75932 | N-ethylmaleimide-sensitive factor attach | 4.19 | 817 |
| 431851 | AI146349 | Hs.271614 | CGI-112 protein | 4.19 | 2608 |
| 457485 | AW081072 | Hs.115960 | KIAA0939 protein | 4.18 | 4593 |
| 446342 | BE298665 | Hs.14846 | solute carrier family 7 (cationic amino | 4.18 | 3746 |
| 421254 | AK001724 | Hs.102950 | coat protein gamma-cop | 4.18 | 1496 |
| 432738 | AI559493 | Hs.165904 | ESTs | 4.17 | 2697 |
| 406216 | | | Target Exon | 4.17 | |
| 459679 | AA936176 | Hs.303666 | gb: om06b10.s1 Soares_NFL_T_GBC_S1 Homo s | 4.17 | 4677 |
| 420996 | AK001927 | Hs.100895 | hypothetical protein FLJ10462 | 4.17 | 1473 5092 |
| 434225 | AA627706 | | ESTs | 4.17 | 2822 |
| 416920 | AA176455 | Hs.80475 | polymerase (RNA) II (DNA directed) polyp | 4.16 | 1037 |
| 441378 | AA931826 | Hs.126846 | ESTs | 4.16 | 3350 |
| 437848 | AI906419 | Hs.284380 | gamma-glutamyltransferase 1 | 4.15 | 3098 |
| 442041 | AW161137 | Hs.209569 | ESTs | 4.15 | 3389 |
| 458176 | AI961519 | Hs.140309 | Homo sapiens, clone IMAGE: 3677194, mRNA, | 4.15 | 4613 |
| 428732 | AA432266 | | ESTs | 4.15 | 2289 |
| 440205 | T86950 | Hs.105448 | ESTs, Weakly similar to B34087 hypotheti | 4.15 | 3271 |
| 456341 | AA229126 | | gb: nc45e10.s1 NCI_CGAP_Pr3 Homo sapiens | 4.15 | 4537 |
| 408946 | AW854991 | Hs.255565 | ESTs | 4.15 | 318 |
| 417923 | R26632 | Hs.106510 | ESTs, Moderately similar to ALU2_HUMAN A | 4.14 | 1137 |
| 419092 | J05581 | Hs.89603 | mucin 1, transmembrane | 4.13 | 1275 5038 |
| 415228 | AF030111 | Hs.78281 | regulator of G-protein signalling 12 | 4.13 | 4943 918 |
| 453377 | AI679149 | Hs.167186 | ESTs | 4.13 | 4402 |
| 443361 | AI792628 | Hs.133273 | ESTs | 4.13 | 3520 |
| 425453 | AW374284 | Hs.237617 | Homo sapiens chromosome 19, cosmid R2689 | 4.13 | 1966 |
| 437933 | AI276132 | | ESTs | 4.12 | 3109 |
| 448484 | BE613340 | Hs.334725 | Homo sapiens, Similar to RIKEN cDNA 9430 | 4.11 | 3975 |
| 431629 | AU077025 | Hs.265827 | interferon, alpha-inducible protein (clo | 4.11 | 2577 |
| 416138 | C18946 | Hs.79026 | myeloid leukemia factor 2 | 4.11 | 976 |
| 417866 | AW067903 | Hs.82772 | collagen, type Xl, alpha 1 | 4.11 | 1132 |
| 408349 | BE546947 | Hs.44276 | homeo box C10 | 4.10 | 258 |
| 405945 | | | Target Exon | 4.10 | |
| 431611 | U58766 | Hs.264428 | tissue specific transplantation antigen | 4.10 | 2575 5482 |
| 429485 | AW197086 | Hs.99338 | ESTs | 4.10 | 2375 |
| 456847 | AI360456 | Hs.37776 | ESTs | 4.10 | 4563 |
| 435043 | AI276478 | | ESTs | 4.10 | 2890 |
| 413976 | BE295452 | Hs.75655 | procollagen-proline, 2-oxoglutarate 4-di | 4.09 | 771 |
| 431374 | BE258532 | Hs.251871 | CTP synthase | 4.09 | 2551 |
| 419102 | AA234098 | Hs.42424 | ESTs, Weakly similar to 2004399A chromos | 4.09 | 1276 |
| 453863 | X02544 | Hs.572 | orosomucoid 1 | 4.09 | 4438 5786 |
| 404755 | | | Target Exon | 4.08 | |
| 448633 | AA311426 | Hs.21635 | tubulin, gamma 1 | 4.08 | 3990 |
| 418478 | U38945 | Hs.1174 | cyclin-dependent kinase inhibitor 2A (me | 4.08 | 1204 5017 |
| 425966 | NM_001761 | Hs.1973 | cyclin F | 4.08 | 2015 5284 |
| 409929 | R38772 | Hs.172619 | myelin transcription factor 1-like | 4.08 | 419 |
| 440042 | AI073387 | Hs.133898 | ESTs | 4.08 | 3255 |
| 437679 | NM_014214 | Hs.5753 | inositol(myo)-1(or 4)-monophosphatase 2 | 4.07 | 3082 5590 |
| 447995 | AI742618 | Hs.181733 | ESTs, Weakly similar to nitrilase homolo | 4.07 | 3934 |
| 417059 | AL037672 | Hs.81071 | extracellular matrix protein 1 | 4.07 | 1059 |
| 427719 | AI393122 | Hs.134726 | ESTs | 4.07 | 2189 |
| 431912 | AI660552 | | ESTs, Weakly similar to A56154 Abl subst | 4.07 | 2615 |
| 411377 | AW841462 | | gb: RC6-CN0014-080300-012-B09 CN0014 Homo | 4.07 | 549 |
| 418205 | L21715 | Hs.83760 | troponin I, skeletal, fast | 4.06 | 1170 5004 |
| 444806 | AI197853 | Hs.312841 | ESTs | 4.05 | 3630 |
| 455513 | AW983772 | | gb: RC3-HN0002-060400-012-h09 HN0002 Homo | 4.05 | 4513 |
| 407487 | S70348 | | gb: Homo sapiens integrin beta 3 mRNA, pa | 4.05 | 164 4772 |
| 451365 | AI791783 | Hs.16063 | ESTs, Weakly similar to ALU8_HUMAN ALU S | 4.05 | 4215 |
| 420848 | NM_005188 | Hs.99980 | Cas-Br-M (murine) ecotropic retroviral t | 4.05 | 1459 5090 |
| 442739 | NM_007274 | Hs.8679 | cytosolic acyl coenzyme A thioester hydr | 4.05 | 3464 5626 |
| 445871 | AI702901 | Hs.145582 | ESTs, Weakly similar to FOR4 MOUSE FORMI | 4.05 | 3706 |
| 412007 | AA999846 | Hs.71986 | ESTs | 4.05 | 602 |
| 459682 | AW241940 | Hs.102500 | hypothetical protein FLJ20481 | 4.04 | 4678 |
| 425234 | AW152225 | Hs.165909 | ESTs, Weakly similar to I38022 hypotheti | 4.04 | 1940 |
| 410082 | AA081594 | Hs.158311 | Musashi (Drosophila) homolog 1 | 4.04 | 442 |
| 409776 | AW499663 | | gb: UI-HF-BR0p-ajj-d-03-0-UI.r1 NIH_MGC_5 | 4.04 | 405 |
| 452533 | AW967801 | Hs.151293 | ESTs, Weakly similar to T42705 hypotheti | 4.04 | 4323 |
| 407673 | AW064404 | Hs.279825 | ESTs | 4.03 | 179 |
| 426609 | AL040604 | Hs.99344 | hypothetical protein PRTD-NY3 | 4.03 | 2082 |
| 422010 | AA302049 | Hs.31181 | Homo sapiens cDNA: FLJ23230 fis, clone C | 4.02 | 1593 |
| 453435 | AJ278473 | Hs.297814 | gb: AJ278473 Homo sapiens adult T-cell le | 4.02 | 4404 |
| 409844 | AW502336 | | gb: UI-HF-BR0p-aka-b-05-0-UI.r1 NIH_MGC_5 | 4.02 | 409 |
| 433294 | AA582082 | Hs.199410 | ESTs | 4.02 | 2754 |
| 420415 | L44281 | Hs.73149 | paired box gene 8 | 4.02 | 1419 |
| 406253 | | | Target Exon | 4.02 | |
| 414602 | AW630088 | Hs.76550 | Homo sapiens mRNA; cDNA DKFZp564B1264 (f | 4.01 | 853 |
| 425081 | X74794 | Hs.154443 | minichromosome maintenance deficient (S. | 4.01 | 1918 5246 |
| 452613 | AA461599 | Hs.23459 | ESTs | 4.01 | 4329 |
| 454831 | AW833768 | | gb: QV4-TT0008-130100-077-e06 TT0008 Homo | 4.00 | 4496 |
| 443147 | AI034351 | Hs.19030 | ESTs | 4.00 | 3499 |
| 414571 | BE410746 | Hs.22868 | protein tyrosine phosphatase, non-recept | 4.00 | 846 |
| 447316 | AI373534 | Hs.337577 | ESTs | 4.00 | 3841 |

Pkey: Unique Eos probeset identifier number
ExAccn: Exemplar Accession number, Genbank accession number
UniGeneID: UniGene number
UniGene Title: UniGene gene title
R1: 90th percentile of breast metastases to the brain Als divided by the 90th percentile of normal breast tissue Als, where the 15th percentile of all normal body tissue Als was subtracted from the both numerator and denominator.
SEQ ID NO(s): SEQ ID number(s) for nucleic acid and protein sequences associated with table entry.

[0338] TABLE 1B

| Pkey | CAT number | Accession |
|---|---|---|
| 400205 | 2538_1 | NM_006265 D38551 X98294 BM477931 BM461566 AU123557 AU133303 AU134649 AW500421 BM172439 AW500587 AW503665 |
| | | AW504355 AW503640 BM152454 AW505260 AI815984 AW504075 AW500716 AL597310 BC001229 BM474371 AA984202 AU135205 |
| | | BE090841 AW163750 BF747730 BF898637 AI206506 AV660870 AV692110 AW386830 AV656831 N84710 AW993470 BF086802 |
| | | BF758454 BG960772 BF757769 BI870853 BE018627 C75436 AW148744 BF757753 BG622067 BE909924 AA708208 BG530266 BF968015 |
| | | AW992930 BF888862 BG536628 AA143164 AW748953 BG498922 BF885190 BF889005 BF754781 BF800003 BM476529 AI627668 |
| | | AW028126 AL046011 BF590668 AI017447 AA579936 AI367597 AA699622 BE280597 AI124620 AI082548 AW274985 AA677870 AI056767 |
| | | BE551689 AA287642 H94499 AI752427 AI652365 AW002374 AW062651 AA360834 N68822 AU135442 AU125960 Z78334 BE545813 |
| | | AI092115 BF312771 BF242859 BG533616 BG533761 BG164745 BG492433 BM473183 AA172043 AA172069 AU157092 AU151353 |
| | | AU155318 BE302211 AI375022 AA085641 AU157923 H88858 AA132730 AA115113 AA909781 AI475256 AA424206 AW572383 AW084296 |
| | | AI184820 AI469178 AA782432 H92184 AA340562 BF195818 AA852821 AW576342 AA827107 AA173317 AW190014 AI918514 AA729372 |
| | | AA729718 AI055958 AA331424 BE328601 AA515690 BI018896 AW628277 AA748368 AA626222 BG492636 AW380620 BF800058 |
| | | AW370956 AA290909 R25857 BG952995 BF801437 AA172077 AU155890 AU149783 AI720904 AA902936 AA865727 AI470830 AV740677 |
| | | AA142982 AA482485 AU145485 AW576399 AU156042 R63448 BF246427 BE928472 D25910 BF758439 BF968785 BE565238 AA355981 |
| | | AI905607 BG291148 BG533096 BG532888 BF030886 BG613756 BE928471 BG574501 AA187596 AA361196 T95557 BG531446 |
| | | BG527242 BG527513 BG611106 AA085995 BF847252 BG024608 BE540261 BG531236 AL579993 BG108733 BG483503 BG571032 |
| | | BG492505 |
| 400183 | 48154_3 | X80199 NM_007359 BI553784 BG720095 BG899766 AI088926 BE857470 AI199713 AI870291 AL121179 AL577898 AA009896 AA868181 |
| | | AA482924 AI637524 AW043834 AU156777 T30547 R05481 BE902481 AW372677 W73547 H51965 BF944628 BE825156 AL567238 |
| | | AW372714 BF759809 AL578496 BE396176 H02384 BE007647 BF917244 |
| 421582 | 13358_1 | X00474 NM_003225 X52003 M12075 BI765761 AW950155 AI571948 BI760569 AA308400 AA568312 BI761955 AA507595 AA614579 |
| | | AA614409 BF747698 BM142326 AA307578 AI925552 AA578674 AA582084 AW009769 AA514776 AA588034 BG271505 AA858276 |
| | | BM142503 AW050700 AI307407 AI202532 AA524242 AI909772 AI970839 BG236516 AW750216 AA587613 AI909749 AI909751 AI910083 AA614539 R55292 AA507418 |
| 427239 | 20459_2 | AL532360 BE794750 AA582906 AI015067 AW271034 BG271636 AW075177 AW071374 AI345565 AI307208 BE138953 BE049086 |
| | | AI334881 AW075006 AW075181 AA464019 AW302733 AW075100 AW073433 AI802854 AI334909 AI802853 AI345036 AI348921 AI340734 |
| | | AI307478 AI251289 AW302327 AW072520 AI312145 AW073656 AW072513 AW071289 AI307559 AA876186 T29587 AI307493 AI255068 |
| | | AI252868 AI252839 AW074809 AI252926 AI252160 AI251662 AI251262 AI610913 AI270787 AI270156 AI252075 AW073469 AW072901 |
| | | AW072496 AW071420 AI305762 AI254764 AI802837 AI251264 AW073049 AW071311 AI340643 BE138965 BE138502 AW073456 |
| | | AI334733 AI054335 BE139260 AI054302 AI054060 AI054057 AI053722 AI289711 BE139228 AW470478 AW271039 AW302085 BE041872 |
| | | AI254494 AI271496 AI252427 BF718773 BF718645 AW074866 BE857822 |
| 441761 | 173757_1 | BF796007 AI718138 BI600878 AI222880 AI719648 AI242524 AI242392 AA961560 BF770656 AW275807 |
| 457341 | 703_15 | AW948320 BE181716 AW983981 AA484444 AW948314 |
| 433157 | 38399_2 | AA578671 AI559353 AW769671 AW769665 |
| 400222 | 9287_3 | NM_002082 L16862 BG828886 BE795217 BE904064 BE294526 BE297283 BE394617 BE935127 BE935106 F12351 BG823182 H16710 |
| 441153 | 264480_3 | BE562826 BE378727 |
| 412377 | 1174171_1 | AW947536 AW947523 AW947539 AW947540 AW947541 AW947535 |
| 447836 | 570540_1 | BI086295 F11364 BE620332 AW877701 AW877654 AW877608 AW877766 T08447 BE887463 AW956871 |
| 453160 | 6028_5 | BC009612 NM_003526 BI597616 AV761592 AV760377 AL601008 BI604131 BE645918 BG187760 BG181525 BG210634 BG192999 |
| | | AI263307 AA344186 AW952966 AA033609 AA037562 AA722183 R79452 H70775 BF674991 BE769437 BG007856 AA037483 AW572535 AI143991 AA084581 AA033610 AV742510 |
| | | AV735788 R08336 |
| 455416 | 1164250_1 | AW937150 AW937151 AW937141 AW937174 AW937132 AW937173 AW937170 AW937165 AW937195 AW937145 AW937164 AW937137 |
| | | AW937160 AW937142 AW937171 AW937191 AW937139 AW937143 AW937159 AW937140 AW937163 AW937135 AW937179 AW937156 |
| 429438 | 30460_1 | NA |
| 433352 | 61720_1 | AF024708 AF024696 AA376773 BE927220 BG249309 BF741901 BF927642 BE176914 BF364317 |
| 412988 | 1342150_1 | BE046680 BE046738 BE044958 |
| 406685 | 0_0 | M18728 |
| 445075 | 2823108_1 | AI651827 AI206885 AI699543 |
| 412999 | 1343220_1 | BE046255 BE048611 BE046716 BE046732 BE046273 |
| 410959 | 1065309_1 | AW811937 AW811939 AW811934 AW811873 AW811951 AW811938 AW852485 AW811932 BE144621 |
| 459010 | 84453_1 | AW955786 BF870627 AA251104 AA331438 AA016068 Z19751 |
| 437026 | 1240260_1 | AW976573 AA742335 AA830000 |
| 450935 | 4469_1 | BE349913 BC002850 BC016704 NM_005851 AF089814 AK001498 AL537879 BG754157 AI129659 AI261895 BG397540 BF663515 |
| | | AW517226 BG677982 AI435188 AI453123 AI198380 AA524481 BG981512 AW269638 AI348113 AI095743 AA457108 AW044584 |
| | | AU151602 AI744572 AI078741 AI879729 AI089613 AI568618 BF109806 AW440972 AA401965 AI027227 AI127506 AA434027 BF732901 |
| | | AW264768 AA833667 AL038554 AI568161 AI350340 AA402084 BE677778 AA933621 BF663514 BG763563 AL574521 BG177226 |
| | | BG759860 BE906329 AW161323 AI879350 BF946477 BF766208 AA633194 AL537880 AL038553 BG468205 BG761617 BI762655 |
| | | BG436637 N49458 BI834722 BG397879 BI258799 AW004930 AA902847 AI832036 AW167549 AA743167 AA848017 AA365434 AI819503 |
| | | AA767866 AI582000 N33615 AI950146 AA444029 AA227130 AA041525 AW339842 AA865972 AA838006 AW157822 AI890994 BI771150 |
| | | BI821666 BE279491 |
| 448604 | 2997328_1 | AI546830 AI546838 |
| 440061 | 10031_11 | BG392038 AA090632 AL523849 R14005 BE559751 |
| 430820 | 32425_1 | AF194815 AF194816 |
| 458098 | 23945_1 | AI082245 BE467534 AI797130 BE467063 BE467767 BE218421 AI694996 BE327781 BE327407 BE833829 AA989054 AA459718 BE833855 |
| | | BE550224 AA832519 AF086393 AV733386 BE465409 N29245 W07677 AA482971 BE503548 H18151 AA461301 W79223 W74510 |
| | | AI090689 AL600773 AL600781 N46003 R28075 R34182 BE071550 AW885857 AI276145 AI276696 H97808 N20540 AI468553 |
| 421994 | 864408_1 | BE542166 AI536692 W49486 AI554576 AI359949 AA329007 AA301695 AA887288 AW954743 BI053257 W49487 |
| 425662 | 29204_6 | BF576185 BG392835 BF832725 AA348657 BE173463 H38593 AA361336 |
| 458744 | 827170_1 | AW445183 AI380746 |
| 426989 | 289835_1 | H10322 AW191920 AA581798 BF909366 BF909310 BF909357 BF909323 BF909317 BF909442 BF909364 BF909342 T23471 F02195 |
| | | AA455133 F04743 D19749 AI224921 BF907691 BF909436 BF909433 BF909347 BF908960 BF911433 BF909439 BF909320 BF908633 |
| | | BF909360 BF909344 BF909326 BF909330 BF909324 BF909322 AA394039 BF909349 AA857913 BF909352 BF912020 BF911220 |
| | | BF909363 BF911329 BF909339 BF907711 BF909341 BF912530 BF912434 BF912513 BF912417 BF912223 BF909336 BF909328 |
| | | BF911219 BF909356 BF909337 AI815206 BF912221 R49595 F02092 R44981 BF909318 BF380684 H17049 H05273 BF909312 BF909314 |
| | | BF912225 |
| 452369 | 89607_1 | AW968737 AA766459 AA025799 |
| 454171 | 1049240_1 | AW854832 AW854798 AW854857 AW854816 AW854834 AW854817 |
| 418317 | 1176924_1 | W22626 BF110459 BI020483 BI025592 BI020028 R59783 T24708 |
| 434225 | 1861692_1 | AA627706 F28433 D63189 |
| 428732 | 13917_2 | AW604761 BG496605 AL534435 N52169 Z40534 AL514785 BF834286 BF832372 AA102279 BG260063 AU123387 BG989683 BF887489 |
| | | BG427243 AA757223 N46621 BE774691 BF223203 AI638487 AI685529 AI656376 AA628336 BF431278 N34895 AA705819 AI921735 |
| | | AA432266 BE067482 AW601418 AI684438 AI251741 AI653304 AA595843 AA431254 AI419788 AI220525 AA620860 AA719177 AA860379 |
| | | AW974279 Z47308 AA299472 AY072912 AL514786 Z44690 AA089566 F05145 AI557255 AI678039 AA926992 AY072910 BG718557 |
| | | AU098965 |
| 456341 | 245628_1 | AA229126 AA229463 |
| 437933 | 724922_1 | AI276132 AA772500 AW295806 AI383186 BE698792 BE698799 |
| 435043 | 811_13 | AA662663 AI432402 AI276478 AI675712 |
| 431912 | 610_10 | BI763666 BI517886 BI759051 AI688604 AI660552 BF588523 AW004785 AW295479 BF591117 BF002672 BF064073 AA594441 AI380340 |
| | | AI700219 AI659950 AI688540 AW296326 |
| 411377 | 1079470_1 | BE092475 BE156657 BE156668 AW841462 |
| 455513 | 1242945_1 | AW983772 AW983837 AW983730 AW983769 AW983836 AW983835 |
| 407487 | 56998_1 | S70348 BF593562 BG999385 BG999377 |
| 409776 | 912213_1 | AW499663 AW502643 AW502632 |
| 409844 | 916085_1 | AW502336 AW502339 AW501736 AW501839 |
| 454831 | 1073690_2 | AW833435 AW833533 AW833768 AW833631 AW833557 |

Pkey: Unique Eos probeset identifier number
CAT number: Gene cluster number
Accession: Genbank accession numbers

[0339] TABLE 1C

| Pkey | Ref | Strand | Nt_position |
|---|---|---|---|
| 405452 | 7656638 | Minus | 93876-94275 |
| 400914 | 3779013 | Plus | 116586-116729, 117860-117986 |
| 403532 | 8076842 | Minus | 81750-81901 |
| 402542 | 9801558 | Minus | 67076-67594 |
| 401451 | 6634068 | Minus | 119926-121272 |
| 402265 | 3287673 | Plus | 21059-21168 |
| 403291 | 7230870 | Plus | 95177-95435 |
| 401076 | 3687273 | Plus | 85725-85917 |
| 402907 | 6706902 | Minus | 8561-8692 |
| 402078 | 8117414 | Minus | 163935-164095, 193229-193504 |
| 403988 | 8576087 | Plus | 16251-16462 |
| 402961 | 9453790 | Plus | 42966-43193, 53444-53524 |
| 402217 | 9795981 | Minus | 21521-21757 |
| 402649 | 9958202 | Minus | 69796-70414 |
| 405046 | 7596829 | Minus | 4373-4528 |
| 403026 | 7670575 | Plus | 56521-56840 |
| 403804 | 8139999 | Minus | 21048-21443 |
| 406137 | 9166422 | Minus | 30487-31058 |
| 405146 | 9438278 | Minus | 102529-102633 |
| 403384 | 9438321 | Minus | 178616-180277 |
| 405968 | 8247789 | Plus | 14893-15148 |
| 405467 | 7770659 | Minus | 17983-18674 |
| 404321 | 9665209 | Minus | 76594-77805 |
| 403882 | 7710258 | Plus | 60805-60997, 62455-62559 |
| 402990 | 7631040 | Minus | 117579-118409 |
| 405501 | 9211311 | Minus | 49085-49400, 49565-49679, |
| | | | 50117-50262 |
| 402586 | 9908948 | Plus | 11846-12041 |
| 401612 | 7705041 | Minus | 100597-100830 |
| 404120 | 7342152 | Plus | 135775-136000 |
| 405850 | 6164995 | Plus | 13871-14110 |
| 405210 | 7230142 | Minus | 81049-81327 |
| 405979 | 8247789 | Minus | 189378-190148 |
| 402885 | 9926751 | Plus | 71919-72049 |
| 404790 | 7230958 | Plus | 38611-38761 |
| 401281 | 9800073 | Minus | 13622-15130 |
| 402504 | 9797871 | Plus | 12366-12614 |
| 400657 | 7249004 | Plus | 160793-161343 |
| 403156 | 9838039 | Minus | 82105-82989 |
| 403481 | 9965004 | Plus | 93496-93633 |
| 405333 | 3165399 | Plus | 149905-150215 |
| 402808 | 6456148 | Minus | 114964-115136, 115461-115585, |
| | | | 115931-11604 |
| 404157 | 9886596 | Minus | 47629-49050 |
| 405101 | 8076859 | Plus | 130732-132266 |
| 402299 | 6693370 | Plus | 23367-25175 |
| 406181 | 5923650 | Plus | 16586-16855 |
| 405573 | 3820491 | Minus | 32645-33144 |
| 400530 | 6981826 | Plus | 39-541 |
| 402229 | 9965022 | Minus | 15739-15951, 16166-16779 |
| 406355 | 9256052 | Minus | 97979-98656 |
| 401807 | 7331536 | Plus | 152325-152912 |
| 403347 | 8569747 | Plus | 654-1101 |
| 406043 | 6758938 | Plus | 36609-37156 |
| 404816 | 5911819 | Minus | 81825-81947, 83523-83639, |
| | | | 86204-86326 |
| 404068 | 3168621 | Minus | 18123-18766 |
| 406216 | 7382582 | Plus | 26949-27491 |
| 405945 | 6758796 | Minus | 24735-25158 |
| 404755 | 7706327 | Minus | 53729-53846 |
| 406253 | 7417725 | Plus | 62137-62741 |

Pkey: Unique number corresponding to an Eos probeset
Ref: Sequence source. The 7 digit numbers in this column are Genbank Identifier (GI) numbers. “Dunham I. et al.” refers to the publication entitled “The DNA sequence of human chromosome 22.” Dunham I. et al., Nature (1999) 402: 489-495.
Strand: Indicates DNA strand from which exons were predicted.
Nt_position: Indicates nucleotide positions of predicted exons.

[0340] TABLE 2A
About 445 genes upregulated in breast metastases to the brain relative to normal body tissues

| Pkey | ExAccn | UniGeneID | UniGene Title | R1 | SEQ ID NO(s): |
|---|---|---|---|---|---|
| 408591 | AF015224 | Hs.46452 | mammaglobin 1 | 84.90 | 281 4801 |
| 429441 | AJ224172 | Hs.204096 | lipophilin B (uteroglobin family member) | 33.41 | 2371 5407 |
| 429170 | NM_001394 | Hs.2359 | dual specificity phosphatase 4 | 30.03 | 2336 5392 |
| 407276 | AI951118 | Hs.326736 | Homo sapiens breast cancer antigen NY-BR | 26.35 | 147 |
| 400292 | AA250737 | Hs.72472 | BMP-R1B (bone morphogenetic protein rec | 20.60 | 6 |
| 419078 | M93119 | Hs.89584 | insulinoma-associated 1 | 18.98 | 1272 5036 |
| 432441 | AW292425 | Hs.163484 | intron of hepatocyte nuclear factor-3 al | 17.25 | 2668 |
| 408045 | AW138959 | Hs.245123 | ESTs | 16.13 | 227 |
| 443171 | BE281128 | Hs.9030 | TONDU | 14.65 | 3501 |
| 400291 | AA401369 | | downstream of breast cancer antigen NY-B | 12.50 | 5 |
| 404561 | | | trichorhinophalangeal syndrome I gene (T | 12.48 | |
| 452838 | U65011 | Hs.30743 | preferentially expressed antigen in mela | 12.45 | 4353 5765 |
| 432415 | T16971 | Hs.289014 | ESTs, Weakly similar to A43932 mucin 2 p | 12.13 | 2665 |
| 410102 | AW248508 | Hs.279727 | ESTs; homologue of PEM-3 [Ciona savignyi | 11.43 | 446 |
| 457465 | AW301344 | Hs.122908 | DNA replication factor | 10.58 | 4592 |
| 422656 | AI870435 | Hs.1569 | LIM homeobox protein 2 | 10.13 | 1668 |
| 425057 | AA826434 | Hs.1619 | achaete-scute complex (Drosophila) homol | 10.08 | 1915 |
| 400205 | | | NM_006265*: Homo sapiens RAD21 (S. pombe) | 9.85 | 1 4680 |
| 407178 | AA195651 | | AP-2 beta transcription factor | 9.23 | 133 |
| 450705 | U90304 | Hs.25351 | iroquois homeobox protein 2A (IRX-2A) ( | 9.15 | 4153 5734 |
| 422756 | AA441787 | Hs.119689 | glycoprotein hormones, alpha polypeptide | 8.48 | 1679 |
| 447342 | AI199268 | Hs.19322 | Homo sapiens, Similar to RIKEN cDNA 2010 | 8.45 | 3845 |
| 444783 | AK001468 | Hs.62180 | anillin (Drosophila Scraps homolog), act | 8.25 | 3628 5645 |
| 401451 | | | NM_004496*: Homo sapiens hepatocyte nucle | 8.25 | 27 4697 |
| 426283 | NM_003937 | Hs.169139 | kynureninase (L-kynurenine hydrolase) | 7.73 | 2048 5297 |
| 439926 | AW014875 | Hs.137007 | ESTs | 7.69 | 3243 |
| 448275 | BE514434 | Hs.20830 | kinesin-like 2 | 7.68 | 3955 |
| 422168 | AA586894 | Hs.112408 | S100 calcium-binding protein A7 (psorias | 7.66 | 1612 |
| 416208 | AW291168 | Hs.41295 | ESTs, Weakly similar to MUC2_HUMAN MUCIN | 7.65 | 981 |
| 457211 | AW972565 | Hs.32399 | ESTs, Weakly similar to S51797 vasodilat | 7.64 | 4583 |
| 447475 | AI380797 | Hs.158992 | ESTs | 7.48 | 3865 |
| 439979 | AW600291 | Hs.6823 | hypothetical protein FLJ10430 | 7.47 | 3251 |
| 411096 | U80034 | Hs.68583 | mitochondrial intermediate peptidase | 7.43 | 4862 535 |
| 418836 | AI655499 | Hs.161712 | BMP-R1B | 7.39 | 1247 |
| 458098 | BE550224 | | metallothionein 1E (functional) | 7.23 | 4611 |
| 409731 | AA125985 | Hs.56145 | thymosin, beta, identified in neuroblast | 7.20 | 402 |
| 430287 | AW182459 | Hs.125759 | ESTs, Weakly similar to LEU5_HUMAN LEUKE | 7.05 | 2460 |
| 417576 | AA339449 | Hs.82285 | phosphoribosylglycinamide formyltransfer | 7.05 | 1102 |
| 458814 | AI498957 | Hs.170861 | ESTs, Weakly similar to Z195_HUMAN ZINC | 6.98 | 4638 |
| 451807 | W52854 | | hypothetical protein FLJ23293 similar to | 6.98 | 4249 |
| 425048 | H05468 | Hs.164502 | ESTs | 6.95 | 1914 |
| 428342 | AI739168 | | Homo sapiens cDNA FLJ13458 fis, clone PL | 6.85 | 2244 |
| 407300 | AA102616 | Hs.120769 | gb: zn43e07.s1 Stratagene HeLa cell s3 93 | 6.85 | 149 |
| 409557 | BE182896 | Hs.3686 | ESTs | 6.78 | 384 |
| 428227 | AA321649 | Hs.2248 | small inducible cytokine subfamily B (Cy | 6.75 | 2231 |
| 415786 | AW419196 | Hs.257924 | hypothetical protein FLJ13782 | 6.70 | 951 |
| 408771 | AW732573 | Hs.47584 | potassium voltage-gated channel, delayed | 6.68 | 305 |
| 445413 | AA151342 | Hs.12677 | CGI-147 protein | 6.63 | 3675 |
| 427365 | AI873274 | | downstream of breast cancer antigen NY-B | 6.62 | 2148 |
| 408908 | BE296227 | Hs.250822 | serine/threonine kinase 15 | 6.58 | 317 |
| 407999 | AI126271 | Hs.49433 | ESTs, Weakly similar to YZ28_HUMAN HYPOT | 6.47 | 222 |
| 415539 | AI733881 | Hs.72472 | BMP-R1B (bone morphogenetic protein rec | 6.47 | 935 |
| 441377 | BE218239 | Hs.202656 | ESTs | 6.45 | 3349 |
| 439963 | AW247529 | Hs.6793 | platelet-activating factor acetylhydrola | 6.44 | 3250 |
| 423242 | AL039402 | Hs.125783 | DEME-6 protein | 6.38 | 1730 |
| 427528 | AU077143 | Hs.179565 | minichromosome maintenance deficient (S. | 6.38 | 2161 |
| 452786 | R61362 | Hs.106642 | ESTs, Weakly similar to T09052 hypotheti | 6.35 | 4344 |
| 453884 | AA355925 | Hs.36232 | KIAA0186 gene product | 6.33 | 4444 |
| 413597 | AW302885 | Hs.117183 | ESTs | 6.23 | 739 |
| 418819 | AA228776 | Hs.191721 | ESTs | 6.14 | 1244 |
| 411598 | BE336654 | Hs.70937 | H3 histone family, member A | 6.08 | 562 |
| 443715 | AI583187 | Hs.9700 | cyclin E1 | 6.05 | 3544 |
| 416135 | AW473656 | Hs.227277 | ESTs | 6.03 | 975 |
| 433675 | AW977653 | Hs.75319 | ribonucleotide reductase M2 polypeptide | 5.98 | 2779 |
| 425234 | AW152225 | Hs.165909 | ESTs, Weakly similar to I38022 hypotheti | 5.84 | 1940 |
| 416933 | BE561850 | Hs.80506 | small nuclear ribonucleoprotein polypept | 5.83 | 1040 |
| 407756 | AA116021 | Hs.38260 | ubiquitin specific protease 18 | 5.67 | 191 |
| 419875 | AA853410 | Hs.93557 | proenkephalin | 5.65 | 1365 |
| 451398 | AI793124 | Hs.144479 | ESTs | 5.64 | 4219 |
| 412140 | AA219691 | Hs.73625 | RAB6 interacting, kinesin-like (rabkines | 5.57 | 613 |
| 450149 | AW969781 | Hs.132863 | Zic family member 2 (odd-paired Drosophi | 5.53 | 4106 |
| 425843 | BE313280 | Hs.159627 | death associated protein 3 | 5.51 | 2003 |
| 422805 | AA436989 | Hs.121017 | H2A histone family, member A | 5.50 | 1683 |
| 426451 | AI908165 | Hs.169946 | GATA-binding protein 3 (T-cell receptor | 5.25 | 2066 |
| 401519 | | | C15000476*: gi\|12737279\|ref\|XP_012163.1\| | 5.25 | |
| 426878 | BE069341 | | Homo sapiens breast cancer antigen NY-BR | 5.20 | 2108 |
| 407366 | AF026942 | Hs.17518 | gb: Homo sapiens cig33 mRNA, partial sequ | 5.18 | 156 |
| 432378 | AI493046 | Hs.146133 | ESTs | 5.18 | 2662 |
| 425707 | AF115402 | Hs.11713 | E74-like factor 5 (ets domain transcript | 5.15 | 1992 5277 |
| 433023 | AW864793 | | thrombospondin 1 | 5.15 | 2725 |
| 424399 | AI905687 | | AI905687: IL-BT095-190199-019 BT095 Homo | 5.14 | 1840 |
| 409269 | AA576953 | Hs.22972 | steroid 5 alpha-reductase 2-like; H5AR g | 5.13 | 358 |
| 448105 | AW591433 | Hs.298241 | Transmembrane protease, serine 3 | 5.08 | 3943 |
| 453392 | U23752 | Hs.32964 | SRY (sex determining region Y)-box 11 | 5.05 | 4403 5776 |
| 425692 | D90041 | Hs.155956 | N-acetyltransferase 1 (arylamine N-acety | 5.03 | 1989 5276 |
| 403485 | | | C3001813*: gi\|12737279\|ref\|XP_012163.1\|k | 5.03 | |
| 452461 | N78223 | Hs.108106 | transcription factor | 5.03 | 4311 |
| 443537 | D13305 | Hs.203 | cholecystokinin B receptor | 5.00 | 3528 5629 |
| 432140 | AK000404 | Hs.272688 | hypothetical protein FLJ20397 | 4.98 | 2634 5500 |
| 422486 | BE514492 | Hs.117487 | gene near HD on 4p16.3 with homology to | 4.95 | 1648 |
| 433043 | W57554 | Hs.125019 | lymphoid nuclear protein (LAF-4) mRNA | 4.88 | 2728 |
| 408035 | NM_006242 | Hs.42215 | protein phosphatase 1, regulatory subuni | 4.85 | 226 4787 |
| 424735 | U31875 | Hs.272499 | DHRS2 Dehydrogenase/reductase (SDR famil | 4.85 | 1879 5229 |
| 424905 | NM_002497 | Hs.153704 | NIMA (never in mitosis gene a)-related k | 4.85 | 1898 5237 |
| 444342 | NM_014398 | Hs.10887 | similar to lysosome-associated membrane | 4.83 | 3591 5638 |
| 419536 | AA603305 | | gb: np12d11.s1 NCI_CGAP_Pr3 Homo sapiens | 4.80 | 1327 |
| 409435 | AI810721 | Hs.95424 | ESTs | 4.78 | 370 |
| 401464 | | | histone deacetylase 5 | 4.73 | |
| 414343 | AL036166 | Hs.75914 | coated vesicle membrane protein | 4.73 | 814 |
| 453863 | X02544 | Hs.572 | orosomucoid 1 | 4.70 | 4438 5786 |
| 410467 | AF102546 | Hs.63931 | dachshund (Drosophila) homolog | 4.70 | 482 4849 |
| 415989 | AI267700 | | ESTs | 4.70 | 963 |
| 449722 | BE280074 | Hs.23960 | cyclin B1 | 4.69 | 4079 |
| 418092 | R45154 | Hs.338439 | ESTs | 4.68 | 1158 |
| 409542 | AA503020 | Hs.36563 | hypothetical protein FLJ22418 | 4.67 | 382 |
| 444858 | AI199738 | Hs.208275 | ESTs, Weakly similar to ALUA_HUMAN !!!! | 4.65 | 3633 |
| 416111 | AA033813 | Hs.79018 | chromatin assembly factor 1, subunit A ( | 4.65 | 972 |
| 450193 | AI916071 | Hs.15607 | Homo sapiens Fanconi anemia complementat | 4.61 | 4111 |
| 409902 | AI337658 | Hs.156351 | ESTs | 4.53 | 416 |
| 422835 | BE218705 | Hs.121378 | metallothionein-like 5, testis-specific | 4.50 | 1686 |
| 433323 | AA805132 | Hs.159142 | ESTs | 4.50 | 2755 |
| 448826 | AI580252 | Hs.293246 | ESTs, Weakly similar to putative p150 [H | 4.48 | 4012 |
| 401866 | | | Target Exon | 4.48 | |
| 430044 | AA464510 | Hs.152812 | ESTs | 4.43 | 2439 |
| 453439 | AI572438 | Hs.32976 | guanine nucleotide binding protein 4 | 4.38 | 4406 |
| 453160 | AI263307 | | H2B histone family, member L | 4.38 | 4380 |
| 432886 | BE159028 | Hs.279704 | chromatin accessibility complex 1 | 4.36 | 2708 |
| 414271 | AK000275 | Hs.75871 | protein kinase C binding protein 1 | 4.35 | 807 |
| 436608 | AA628980 | Hs.192371 | down syndrome critical region protein DS | 4.34 | 2997 |
| 427712 | AI368024 | Hs.283696 | ESTs | 4.34 | 2187 |
| 424085 | NM_002914 | Hs.139226 | replication factor C (activator 1) 2 (40 | 4.33 | 1803 5198 |
| 404571 | | | NM_015902*: Homo sapiens progestin induce | 4.33 | 4724 57 |
| 429986 | AF092047 | Hs.227277 | sine oculis homeobox (Drosophila) homolo | 4.25 | 2434 5431 |
| 450325 | AI935962 | Hs.91973 | ESTs | 4.23 | 4129 |
| 442861 | AA243837 | Hs.57787 | ESTs | 4.23 | 3475 |
| 431585 | BE242803 | Hs.262823 | hypothetical protein FLJ10326 | 4.23 | 2572 |
| 426501 | AW043782 | Hs.293616 | ESTs | 4.21 | 2072 |
| 448664 | AI879317 | Hs.334691 | splicing factor 3a, subunit 1, 120 kD | 4.20 | 3994 |
| 443695 | AW204099 | | ESTs, Weakly similar to AF126780 1 retin | 4.18 | 3541 |
| 432201 | AI538613 | Hs.298241 | Transmembrane protease, serine 3 | 4.16 | 2643 |
| 407980 | AA046309 | Hs.344241 | gb: zf12f01.s1 Soares_fetal_heart_NbHH19W | 4.15 | 221 |
| 433285 | AW975944 | Hs.237396 | ESTs | 4.14 | 2753 |
| 447519 | U46258 | Hs.339665 | ESTs | 4.13 | 3873 |
| 451752 | AB032997 | | KIAA1171 protein | 4.12 | 4247 5750 |
| 426581 | AB040956 | Hs.135890 | KIAA1523 protein | 4.10 | 2080 5311 |
| 436488 | BE620909 | Hs.261023 | hypothetical protein FLJ20958 | 4.10 | 2989 |
| 437389 | AL359587 | Hs.271586 | hypothetical protein DKFZp762M115 | 4.08 | 3063 5586 |
| 418700 | AI963808 | Hs.86970 | ESTs, Moderately similar to ALU5_HUMAN A | 4.08 | 1230 |
| 442760 | BE075297 | Hs.6614 | ESTs, Weakly similar to A43932 mucin 2 p | 4.08 | 3466 |
| 427427 | AF077345 | Hs.177936 | lectin, superfamily member 1 (cartilage- | 4.07 | 2153 5338 |
| 437834 | AA769294 | | gb: nz36g03.s1 NCI_CGAP_GCB1 Homo sapiens | 4.05 | 3096 |
| 436291 | BE568452 | Hs.344037 | protein regulator of cytokinesis 1 | 4.02 | 2975 |
| 441362 | BE614410 | Hs.23044 | RAD51 (S. cerevisiae) homolog (E coli Re | 4.01 | 3347 |
| 400528 | | | NM_020975*: Homo sapiens ret proto-oncoge | 4.01 | 18 4690 |
| 414706 | AW340125 | Hs.76989 | KIAA0097 gene product | 4.01 | 865 |
| 446999 | AA151520 | | hypothetical protein MGC4485 | 4.00 | 3811 |
| 434203 | BE262677 | Hs.283558 | hypothetical protein PRO1855 | 3.99 | 2820 |
| 414670 | BE409525 | Hs.902 | neurofibromin 2 (bilateral acoustic neur | 3.98 | 860 |
| 419743 | AW408762 | Hs.5957 | Homo sapiens clone 24416 mRNA sequence | 3.97 | 1356 |
| 438321 | AA576635 | Hs.6153 | CGI-48 protein | 3.97 | 3133 |
| 448686 | AA158659 | Hs.334712 | hypothetical protein FLJ14744 | 3.95 | 3997 |
| 415263 | AA948033 | Hs.130853 | ESTs | 3.93 | 920 |
| 423175 | W27595 | Hs.347310 | hypothetical protein FLJ14627 | 3.93 | 1724 |
| 433409 | AI278802 | Hs.25661 | ESTs | 3.90 | 2761 |
| 418113 | AI272141 | Hs.83484 | SRY(sex determining regionY)-box 4 | 3.88 | 1161 |
| 427811 | M81057 | Hs.180884 | carboxypeptidase B1 (tissue) | 3.86 | 2197 5346 |
| 447334 | AA515032 | Hs.91109 | ESTs | 3.86 | 3844 |
| 415621 | AI648602 | Hs.55468 | ESTs | 3.85 | 938 |
| 432840 | AK001403 | Hs.279521 | hypothetical protein FLJ20530 | 3.84 | 2704 5516 |
| 436167 | AA705651 | Hs.25087 | ESTs | 3.83 | 2965 |
| 421037 | AI684808 | Hs.197653 | ESTs | 3.83 | 1475 |
| 423165 | AI937547 | Hs.124915 | hypothetical protein MGC2601 | 3.81 | 1722 |
| 443347 | AI052543 | Hs.133244 | melanoma-derived leucine zipper, extra-n | 3.81 | 3519 |
| 424800 | AL035588 | Hs.153203 | MyoD family inhibitor | 3.81 | 1888 5232 |
| 425529 | NM_014656 | Hs.158282 | KIAA0040 gene product | 3.77 | 1975 5270 |
| 409648 | AW451449 | Hs.57749 | ESTs | 3.75 | 391 |
| 426827 | AW067805 | Hs.172665 | methylenetetrahydrofolate dehydrogenase | 3.75 | 2104 |
| 420650 | AA455706 | Hs.44581 | heat shock protein hsp70-related protein | 3.74 | 1441 |
| 434569 | AI311295 | Hs.344478 | KIAA0196 gene product | 3.73 | 2849 |
| 428654 | NM_012091 | Hs.188661 | adenosine deaminase, tRNA-specific 1 | 3.70 | 2280 5370 |
| 407378 | AA299264 | Hs.57776 | ESTs, Moderately similar to I38022 hypot | 3.70 | 160 |
| 404632 | | | NM_022490: Homo sapiens hypothetical prot | 3.68 | 4726 59 |
| 414004 | AA737033 | Hs.7155 | similar to thymidylate kinase family LPS | 3.67 | 772 |
| 448595 | AB014544 | Hs.21572 | KIAA0644 gene product | 3.66 | 3987 5711 |
| 429922 | Z97630 | Hs.226117 | H1 histone family, member 0 | 3.66 | 2427 5430 |
| 419440 | AB020689 | Hs.90419 | KIAA0882 protein | 3.66 | 1313 5047 |
| 439453 | BE264974 | Hs.6566 | thyroid hormone receptor interactor 13 | 3.66 | 3208 |
| 456508 | AA502764 | Hs.123469 | ESTs, Weakly similar to AF208855 1 BM-01 | 3.66 | 4547 |
| 433701 | AW445023 | Hs.15155 | ESTs | 3.65 | 2782 |
| 420390 | AA330047 | Hs.191187 | ESTs | 3.65 | 1418 |
| 418661 | NM_001949 | Hs.1189 | E2F transcription factor 3 | 3.65 | 1222 5022 |
| 418203 | X54942 | Hs.83758 | CDC28 protein kinase 2 | 3.64 | 1169 5003 |
| 434844 | AF157116 | Hs.22350 | hypothetical protein LOC56757 | 3.63 | 2873 |
| 424179 | F30712 | Hs.334573 | Homo sapiens, clone IMAGE: 4285740, mRNA | 3.63 | 1812 |
| 447350 | AI375572 | | v-erb-a avian erythroblastic leukemia vi | 3.60 | 3849 |
| 444743 | AA045648 | Hs.301957 | nudix (nucleoside diphosphate linked moi | 3.60 | 3624 |
| 430839 | U67918 | Hs.248049 | fibroblast growth factor 10 | 3.60 | 2519 5464 |
| 422309 | U79745 | Hs.114924 | solute carrier family 16 (monocarboxylic | 3.58 | 1630 5146 |
| 439772 | AL365406 | Hs.10268 | Homo sapiens mRNA full length insert cDN | 3.58 | 3234 |
| 435664 | AI032087 | Hs.269819 | ESTs | 3.57 | 2936 |
| 428134 | AA421773 | Hs.161008 | ESTs | 3.55 | 2221 |
| 452092 | BE245374 | Hs.27842 | hypothetical protein FLJ11210 | 3.54 | 4268 |
| 438869 | AF075009 | | gb: Homo sapiens full length insert cDNA | 3.53 | 3171 |
| 410555 | U92649 | Hs.64311 | a disintegrin and metalloproteinase doma | 3.53 | 4851 492 |
| 452994 | AW962597 | Hs.31305 | KIAA1547 protein | 3.51 | 4363 |
| 402496 | | | Target Exon | 3.51 | |
| 429353 | AL117406 | Hs.335891 | ATP-binding cassette transporter MRP8 | 3.49 | 2359 |
| 423419 | R55336 | Hs.23539 | ESTs | 3.48 | 1742 |
| 441690 | R81733 | Hs.33106 | ESTs | 3.47 | 3369 |
| 407235 | D20569 | Hs.169407 | SAC2 (suppressor of actin mutations 2, y | 3.47 | 140 |
| 412970 | AB026436 | Hs.177534 | dual specificity phosphatase 10 | 3.45 | 4890 687 |
| 400880 | | | NM_000611*: Homo sapiens CD59 antigen p18 | 3.45 | 23 4694 |
| 409456 | U34962 | Hs.54473 | cardiac-specific homeo box | 3.44 | 374 4825 |
| 457579 | AB030816 | Hs.36761 | HRAS-like suppressor | 3.44 | 4595 5813 |
| 409430 | R21945 | Hs.346735 | splicing factor, arginine/serine-rich 5 | 3.43 | 369 |
| 406922 | S70284 | Hs.119597 | gb: stearoyl-CoA desaturase [human, adipo | 3.43 | 109 4755 |
| 418304 | AA215702 | | gb: zr97g10.r1 NCI_CGAP_GCB1 Homo sapiens | 3.43 | 1178 |
| 428479 | Y00272 | Hs.334562 | cell division cycle 2, G1 to S and G2 to | 3.43 | 2264 5363 |
| 444670 | H58373 | Hs.332938 | hypothetical protein MGC5370 | 3.43 | 3618 |
| 400277 | | | Eos Control | 3.42 | |
| 440273 | AI805392 | Hs.325335 | Homo sapiens cDNA: FLJ23523 fis, clone L | 3.39 | 3274 |
| 452833 | BE559681 | Hs.30736 | KIAA0124 protein | 3.39 | 4351 |
| 413450 | Z99716 | Hs.75372 | N-acetylgalactosaminidase, alpha- | 3.39 | 4901 723 |
| 453900 | AW003582 | Hs.226414 | ESTs, Weakly similar to ALU8_HUMAN ALU S | 3.38 | 4448 |
| 415402 | AA164687 | Hs.177576 | mannosyl (alpha-1,3-)-glycoprotein beta- | 3.37 | 930 |
| 426931 | NM_003416 | Hs.2076 | zinc finger protein 7 (KOX 4, clone HF.1 | 3.37 | 2114 5328 |
| 426384 | AI472078 | Hs.303662 | hypothetical protein FLJ13189 (FLJ13189) | 3.35 | 2060 |
| 425782 | U66468 | Hs.159525 | cell growth regulatory with EF-hand doma | 3.35 | 1996 5278 |
| 420005 | AW271106 | Hs.133294 | ESTs | 3.35 | 1372 |
| 425548 | AA890023 | Hs.1906 | prolactin receptor | 3.35 | 1978 |
| 441790 | AW294909 | Hs.132208 | ESTs | 3.35 | 3372 |
| 429084 | AJ001443 | Hs.195614 | splicing factor 3b, subunit 3, 130 kD | 3.34 | 2332 5390 |
| 446258 | AI283476 | Hs.263478 | ESTs | 3.34 | 3740 |
| 420090 | AA220238 | Hs.94986 | ribonuclease P (38 kD) | 3.33 | 1383 |
| 439352 | BE614347 | Hs.169615 | hypothetical protein FLJ20989 | 3.31 | 3202 |
| 411558 | AA102670 | Hs.70725 | gamma-aminobutyric acid (GABA) A recepto | 3.30 | 560 |
| 444371 | BE540274 | Hs.239 | forkhead box M1 | 3.30 | 3592 |
| 437967 | BE277414 | Hs.5947 | met transforming oncogene (derived from | 3.29 | 3112 |
| 421305 | BE397354 | Hs.324830 | diptheria toxin resistance protein requi | 3.29 | 1505 |
| 406685 | AA18728 | | gb: Human nonspecific crossreacting antig | 3.29 | 4745 83 |
| 418478 | U38945 | Hs.1174 | cyclin-dependent kinase inhibitor 2A (me | 3.28 | 1204 5017 |
| 401558 | | | ENSP00000220478*: SECRETOGRANIN III. | 3.28 | |
| 407021 | U52077 | | gb: Human mariner1 transposase gene, comp | 3.27 | 119 4762 |
| 446054 | AB014537 | Hs.13604 | KIAA0637 gene product | 3.27 | 3722 5664 |
| 441020 | W79283 | Hs.35962 | ESTs | 3.26 | 3325 |
| 441128 | AA570256 | | ESTs, Weakly similar to T23273 hypotheti | 3.24 | 3334 |
| 447349 | AI375546 | | gb: tc23d04.x1 Soares_total_fetus_Nb2HF8_{—} | 3.24 | 3848 |
| 434378 | AA631739 | Hs.335440 | EST | 3.24 | 2836 |
| 400295 | W72838 | | AI905687: IL-BT095-190199-019 BT095 Homo | 3.24 | 8 |
| 452206 | AW340281 | Hs.33074 | Homo sapiens, clone IMAGE: 3606519, mRNA, | 3.23 | 4281 |
| 443162 | T49951 | Hs.9029 | DKFZP434G032 protein | 3.22 | 3500 |
| 427658 | H61387 | Hs.30868 | nogo receptor | 3.21 | 2175 |
| 458621 | AI221741 | Hs.117777 | ESTs | 3.21 | 4630 |
| 422938 | NM_001809 | Hs.1594 | centromere protein A (17 kD) | 3.20 | 1694 5162 |
| 424871 | NM_004525 | Hs.153595 | low density lipoprotein-related protein | 3.20 | 1892 5234 |
| 410340 | AW182833 | Hs.112188 | hypothetical protein FLJ13149 | 3.20 | 466 |
| 416294 | D86980 | Hs.79170 | KIAA0227 protein | 3.20 | 4958 984 |
| 417386 | AL037228 | Hs.82043 | D123 gene product | 3.20 | 1090 |
| 418004 | U37519 | Hs.87539 | aldehyde dehydrogenase 3 family, member | 3.20 | 1145 4997 |
| 444461 | R53734 | Hs.25978 | ESTs, Weakly similar to 2109260A B cell | 3.18 | 3600 |
| 410174 | AA306007 | Hs.59461 | DKFZP434C245 protein | 3.17 | 453 |
| 408393 | AW015318 | Hs.23165 | ESTs | 3.17 | 263 |
| 426215 | AW963419 | Hs.155223 | stanniocalcin 2 | 3.17 | 2039 |
| 417771 | AA804698 | Hs.82547 | retinoic acid receptor responder (tazaro | 3.16 | 1121 |
| 453005 | AW055308 | Hs.31803 | ESTs, Weakly similar to N-WASP [H. sapien | 3.15 | 4365 |
| 413278 | BE563085 | Hs.833 | interferon-stimulated protein, 15 kDa | 3.15 | 705 |
| 441134 | W29092 | Hs.346950 | cellular retinoic acid-binding protein 1 | 3.14 | 3335 |
| 420802 | U22376 | Hs.1334 | v-myb avian myeloblastosis viral oncogen | 3.13 | 1455 5087 |
| 449746 | AI668594 | Hs.176588 | ESTs, Weakly similar to CP4Y_HUMAN CYTOC | 3.13 | 4080 |
| 417601 | NM_014735 | Hs.82292 | KIAA0215 gene product | 3.12 | 1105 4991 |
| 421654 | AW163267 | Hs.106469 | suppressor of var1 (S. cerevisiae) 3-like | 3.11 | 1550 |
| 408877 | AA479033 | Hs.130315 | ESTs, Weakly similar to A47582 B-cell gr | 3.10 | 314 |
| 453511 | AL031224 | Hs.33102 | AP-2 beta transcription factor | 3.10 | 4416 5779 |
| 422981 | AF026445 | Hs.122752 | TATA box binding protein (TBP)-associate | 3.10 | 1706 5165 |
| 413374 | NM_001034 | Hs.75319 | ribonucleotide reductase M2 polypeptide | 3.10 | 4899 713 |
| 449704 | AK000733 | Hs.23900 | GTPase activating protein | 3.10 | 4076 5722 |
| 427581 | NM_014788 | Hs.179703 | KIAA0129 gene product | 3.08 | 2167 5339 |
| 418329 | AW247430 | Hs.84152 | cystathionine-beta-synthase | 3.05 | 1186 |
| 422010 | AA302049 | Hs.31181 | Homo sapiens cDNA: FLJ23230 fis, clone C | 3.04 | 1593 |
| 409892 | AW956113 | Hs.7149 | gb: EST368183 MAGE resequences, MAGD Homo | 3.04 | 414 |
| 427674 | NM_003528 | Hs.2178 | H2B histone family, member Q | 3.04 | 2177 5342 |
| 431745 | AW972448 | Hs.163425 | Novel FGENESH predicted cadherin repeat | 3.03 | 2595 |
| 409757 | NM_001898 | Hs.123114 | cystatin SN | 3.03 | 403 4832 |
| 417288 | AI984792 | Hs.108812 | hypothetical protein FLJ22004 | 3.03 | 1077 |
| 420111 | AA255652 | | gb: zs21h11.r1 NCI_CGAP_GCB1 Homo sapiens | 3.03 | 1386 |
| 428771 | AB028992 | Hs.193143 | KIAA1069 protein | 3.03 | 2295 5375 |
| 408527 | AL135018 | Hs.33074 | Homo sapiens, clone IMAGE: 3606519, mRNA, | 3.02 | 276 |
| 424001 | W67883 | Hs.137476 | paternally expressed 10 | 3.02 | 1788 |
| 420552 | AK000492 | Hs.98806 | hypothetical protein | 3.02 | 1430 5081 |
| 413063 | AL035737 | Hs.75184 | chitinase 3-like 1 (cartilage glycoprote | 3.01 | 692 |
| 410619 | BE512730 | Hs.65114 | keratin 18 | 3.01 | 498 |
| 453902 | BE502341 | Hs.3402 | ESTs | 3.01 | 4449 |
| 423645 | AI215632 | Hs.147487 | ESTs | 3.00 | 1764 |
| 442353 | BE379594 | Hs.49136 | ESTs, Moderately similar to ALU7_HUMAN A | 3.00 | 3423 |
| 425842 | AI587490 | Hs.159623 | NK-2 (Drosophila) homolog B | 3.00 | 2002 |
| 439680 | AW245741 | Hs.58461 | ESTs, Weakly similar to A35659 krueppel- | 2.99 | 3229 |
| 442530 | AI580830 | Hs.176508 | Homo sapiens cDNA FLJ14712 fis, clone NT | 2.99 | 3437 |
| 430066 | AI929659 | Hs.237825 | signal recognition particle 72 kD | 2.99 | 2442 |
| 420649 | AI866964 | Hs.124704 | ESTs, Moderately similar to S65657 alpha | 2.98 | 1440 |
| 437915 | AI637993 | Hs.202312 | Homo sapiens clone N11 NTera2D1 teratoca | 2.98 | 3105 |
| 452256 | AK000933 | Hs.28661 | Homo sapiens cDNA FLJ10071 fis, clone HE | 2.98 | 4289 |
| 433029 | NM_014322 | Hs.279926 | opsin 3 (encephalopsin) | 2.97 | 2726 5524 |
| 417924 | AU077231 | Hs.82932 | cyclin D1 (PRAD1: parathyroid adenomatos | 2.97 | 1138 |
| 455286 | BE144384 | | gb: MR0-HT0166-191199-004-c11 HT0166 Homo | 2.95 | 4504 |
| 437682 | AA476652 | Hs.94952 | Homo sapiens cDNA: FLJ23371 fis, clone H | 2.95 | 3083 |
| 408633 | AW963372 | Hs.46677 | PRO2000 protein | 2.95 | 286 |
| 401203 | | | Target Exon | 2.95 | |
| 418675 | AW299723 | Hs.87223 | bone morphogenetic protein receptor, typ | 2.95 | 1225 |
| 428166 | AA423849 | Hs.79530 | M5-14 protein | 2.95 | 2224 |
| 440594 | AW445167 | Hs.126036 | ESTs | 2.95 | 3302 |
| 430294 | AI538226 | Hs.32976 | guanine nucleotide binding protein 4 | 2.94 | 2463 |
| 434094 | AA305599 | Hs.238205 | hypothetical protein PRO2013 | 2.94 | 2814 |
| 412141 | AI183838 | Hs.48938 | hypothetical protein FLJ21802 | 2.94 | 614 |
| 430289 | AK001952 | Hs.238039 | hypothetical protein FLJ11090 | 2.94 | 2461 5440 |
| 441021 | AW578716 | Hs.7644 | H1 histone family, member 2 | 2.93 | 3326 |
| 439580 | AF086401 | Hs.293847 | ESTs, Moderately similar to S65657 alpha | 2.93 | 3220 |
| 423198 | M81933 | Hs.1634 | cell division cycle 25A | 2.92 | 1727 5174 |
| 453751 | R36762 | Hs.101282 | Homo sapiens cDNA: FLJ21238 fis, clone C | 2.92 | 4428 |
| 412942 | AL120344 | Hs.75074 | mitogen-activated protein kinase-activat | 2.90 | 685 |
| 424036 | AA770688 | | H2A histone family, member L | 2.90 | 1793 |
| 442711 | AF151073 | Hs.8645 | hypothetical protein | 2.90 | 3460 5625 |
| 427719 | AI393122 | Hs.134726 | ESTs | 2.89 | 2189 |
| 443845 | AI590084 | | ESTs, Weakly similar to A47161 Mac-2-bin | 2.89 | 3560 |
| 432731 | R31178 | Hs.287820 | fibronectin 1 | 2.89 | 2695 |
| 444079 | H09048 | Hs.23606 | ESTs | 2.88 | 3572 |
| 432728 | NM_006979 | Hs.278721 | HLA class II region expressed gene KE4 | 2.88 | 2694 5512 |
| 422955 | AW967824 | Hs.324237 | ESTs | 2.88 | 1697 |
| 432116 | AA902953 | Hs.308538 | ESTs | 2.88 | 2632 |
| 427521 | AW973352 | | ESTs | 2.88 | 2159 |
| 431127 | U66618 | Hs.250581 | SWI/SNF related, matrix associated, acti | 2.87 | 2532 |
| 416636 | N32536 | Hs.42645 | solute carrier family 16 (monocarboxylic | 2.87 | 1008 |
| 409703 | NM_006187 | Hs.56009 | 2′-5′-oligoadenylate synthetase 3 (100 k | 2.87 | 396 4831 |
| 440074 | AA863045 | Hs.10669 | ESTs, Weakly similar to T00050 hypotheti | 2.87 | 3259 |
| 411285 | AI733766 | Hs.69429 | Homo sapiens IMAGE: 512024 clone, mRNA | 2.86 | 545 |
| 442772 | AW503680 | Hs.5957 | Homo sapiens clone 24416 mRNA sequence | 2.86 | 3468 |
| 431566 | AF176012 | Hs.260720 | J domain containing protein 1 | 2.85 | 2568 5479 |
| 405366 | | | NM_003371*: Homo sapiens vav 2 oncogene ( | 2.85 | 4735 69 |
| 414747 | U30872 | Hs.77204 | centromere protein F (350/400 kD, mitosin | 2.85 | 4927 873 |
| 452099 | BE612992 | Hs.27931 | hypothetical protein FLJ10607 similar to | 2.83 | 4270 |
| 405770 | | | NM_002362: Homo sapiens melanoma antigen, | 2.83 | 4740 74 |
| 439024 | R96696 | Hs.35598 | ESTs | 2.83 | 3183 |
| 420440 | NM_002407 | Hs.97644 | mammaglobin 2 | 2.82 | 1422 5076 |
| 424339 | BE257148 | | endoglycan | 2.82 | 1831 |
| 439574 | AI469788 | | ESTs | 2.82 | 3219 |
| 438714 | AA814859 | | ESTs | 2.81 | 3161 |
| 448789 | BE539108 | Hs.22051 | hypothetical protein MGC15548 | 2.80 | 4007 |
| 431546 | L39211 | Hs.259785 | carnitine palmitoyltransferase I, liver | 2.80 | 2563 5478 |
| 428898 | AB033070 | Hs.194408 | KIAA1244 protein | 2.80 | 2316 5383 |
| 452826 | BE245286 | Hs.301636 | peroxisomal biogenesis factor 6 | 2.78 | 4349 |
| 406277 | | | Target Exon | 2.78 | |
| 423554 | M90516 | Hs.1674 | glutamine-fructose-6-phosphate transamin | 2.78 | 1758 5182 |
| 437108 | AA434054 | Hs.80624 | hypothetical protein MGC2560 | 2.77 | 3034 |
| 410275 | U85658 | Hs.61796 | transcription factor AP-2 gamma (activat | 2.77 | 462 4842 |
| 405558 | | | Target Exon | 2.77 | |
| 452620 | AA436504 | Hs.119286 | ESTs | 2.77 | 4330 |
| 406625 | Y13647 | Hs.119597 | stearoyl-CoA desaturase (delta-9-desatur | 2.77 | 4744 79 |
| 416128 | AA173632 | | CDC14 (cell division cycle 14, S. cerevi | 2.76 | 974 |
| 448877 | AI583696 | Hs.253313 | ESTs | 2.76 | 4016 |
| 431882 | NM_001426 | Hs.271977 | engrailed homolog 1 | 2.75 | 2612 5493 |
| 411678 | AI907114 | Hs.71465 | squalene epoxidase | 2.75 | 568 |
| 449318 | AW236021 | Hs.78531 | Homo sapiens, Similar to RIKEN cDNA 5730 | 2.75 | 4055 |
| 433388 | AI432672 | Hs.288539 | hypothetical protein FLJ22191 | 2.75 | 2759 |
| 409178 | BE393948 | Hs.50915 | kallikrein 5 | 2.75 | 345 |
| 409960 | BE261944 | | hexokinase 1 | 2.74 | 422 |
| 408296 | AL117452 | Hs.44155 | DKFZP586G1517 protein | 2.74 | 252 4792 |
| 422559 | AW247696 | Hs.155839 | hypothetical protein MGC12934 | 2.73 | 1656 |
| 415889 | R24563 | | VPS10 domain receptor protein | 2.73 | 957 |
| 406043 | | | Target Exon | 2.73 | |
| 440351 | AF030933 | Hs.7179 | RAD1 (S. pombe) homolog | 2.73 | 3285 5607 |
| 411630 | U42349 | Hs.71119 | Putative prostate cancer tumor suppresso | 2.73 | 4866 565 |
| 421077 | AK000061 | Hs.101590 | hypothetical protein | 2.72 | 1479 5093 |
| 407204 | R41933 | Hs.140237 | ESTs, Weakly similar to ALU1_HUMAN ALU S | 2.72 | 136 |
| 435532 | AW291488 | Hs.117305 | Homo sapiens, clone IMAGE: 3682908, mRNA | 2.70 | 2923 |
| 446163 | AA026880 | Hs.25252 | prolactin receptor | 2.70 | 3731 |
| 412482 | AI499930 | Hs.334885 | mitochondrial GTP binding protein | 2.70 | 636 |
| 409235 | AA188827 | Hs.7988 | ESTs, Weakly similar to I38022 hypotheti | 2.70 | 354 |
| 407242 | M18728 | | gb: Human nonspecific crossreacting antig | 2.69 | 142 4766 |
| 449349 | AI825386 | | hypothetical protein FLJ21939 similar to | 2.68 | 4057 |
| 448552 | AW973653 | Hs.20104 | hypothetical protein FLJ00052 | 2.68 | 3983 |
| 404580 | | | trichorhinophalangeal syndrome I gene (T | 2.68 | |
| 416198 | H27332 | Hs.99598 | hypothetical protein MGC5338 | 2.68 | 980 |
| 442643 | U82756 | | PRP4/STK/WD splicing factor | 2.67 | 3457 5623 |
| 422363 | T55979 | Hs.115474 | replication factor C (activator 1) 3 (38 | 2.67 | 1636 |
| 407137 | T97307 | | gb: ye53h05.s1 Soares fetal liver spleen | 2.67 | 128 |
| 404076 | | | NM_016020*: Homo sapiens CGI-75 protein ( | 2.67 | 4719 51 |
| 447805 | AW627932 | Hs.302421 | gemin4 | 2.67 | 3908 |
| 450256 | AA286887 | Hs.24724 | MFH-amplified sequences with leucine-ric | 2.66 | 4120 |
| 452834 | AI638627 | Hs.105685 | KIAA1688 protein | 2.66 | 4352 |
| 439949 | AW979197 | Hs.292073 | ESTs, Weakly similar to ALU7_HUMAN ALU S | 2.66 | 3248 |
| 416677 | T83470 | Hs.334840 | ESTs, Moderately similar to I78885 serin | 2.65 | 1012 |
| 434540 | NM_016045 | Hs.3945 | CGI-107 protein | 2.65 | 2847 5549 |
| 404857 | | | ENSP00000215851*: DJ930L11.1 (SIMILAR TO | 2.65 | |
| 450728 | AW162923 | Hs.25363 | presenilin 2 (Alzheimer disease 4) | 2.65 | 4156 |
| 430452 | AI888450 | Hs.174644 | hypothetical protein FLJ21669 | 2.65 | 2486 |
| 425018 | BE245277 | Hs.154196 | E4F transcription factor 1 | 2.65 | 1912 |
| 419767 | W73306 | Hs.306668 | Homo sapiens cDNA FLJ14089 fis, clone MA | 2.65 | 1361 |
| 435124 | AA725362 | Hs.120456 | ESTs | 2.65 | 2897 |
| 426919 | AL041228 | | ELAV (embryonic lethal, abnormal vision, | 2.65 | 2111 |
| 407168 | R45175 | Hs.117183 | ESTs | 2.65 | 131 |
| 422880 | AF228704 | Hs.193974 | glutathione reductase | 2.63 | 1689 5161 |
| 409799 | D11928 | Hs.76845 | phosphoserine phosphatase-like | 2.63 | 407 |
| 402102 | | | Target Exon | 2.63 | |
| 452243 | AL355715 | Hs.28555 | programmed cell death 9 (PDCD9) | 2.63 | 4287 5756 |
| 429901 | AK000502 | Hs.56237 | hypothetical protein FLJ20495 | 2.62 | 2424 5429 |
| 454425 | AW300927 | Hs.27192 | hypothetical protein dJ1057B20.2 | 2.62 | 4482 |
| 407792 | AI077715 | Hs.39384 | putative secreted ligand homologous to f | 2.61 | 196 |
| 407777 | AA161071 | Hs.71465 | squalene epoxidase | 2.61 | 194 |
| 451369 | AA017321 | Hs.269691 | ESTs | 2.61 | 4216 |
| 432586 | AA568548 | | ESTs | 2.60 | 2681 |
| 415632 | U67085 | Hs.78524 | TcD37 homolog | 2.60 | 4950 939 |
| 419526 | AI821895 | Hs.193481 | ESTs | 2.60 | 1325 |
| 400884 | | | Target Exon | 2.60 | |
| 425671 | AF193612 | Hs.159142 | lunatic fringe (Drosophila) homolog | 2.60 | 1984 5274 |
| 425236 | AW067800 | Hs.155223 | stanniocalcin 2 | 2.60 | 1941 |
| 453507 | AF083217 | Hs.33085 | WD repeat domain 3 | 2.59 | 4414 5778 |
| 423081 | AF262992 | Hs.123159 | sperm associated antigen 4 | 2.58 | 1717 5167 |
| 422771 | NM_012318 | Hs.120165 | leucine zipper-EF-hand containing transm | 2.58 | 1681 5158 |
| 419589 | AW973708 | Hs.201925 | Homo sapiens cDNA FLJ13446 fis, clone PL | 2.58 | 1336 |
| 403006 | | | NM_006933*: Homo sapiens solute carrier f | 2.58 | 41 4710 |
| 453785 | AI368236 | Hs.283732 | ESTs, Moderately similar to ALU1_HUMAN A | 2.58 | 4432 |
| 418437 | AA771738 | Hs.348000 | ESTs, Moderately similar to ALU5_HUMAN A | 2.58 | 1201 |
| 436211 | AK001581 | Hs.334828 | hypothetical protein FLJ10719; KIAA1794 | 2.58 | 2967 5576 |
| 406627 | T64904 | Hs.163780 | ESTs | 2.57 | 80 |
| 431130 | NM_006103 | Hs.2719 | HE4; epididymis-specific, whey-acidic pr | 2.57 | 2533 5470 |
| 424308 | AW975531 | Hs.154443 | minichromosome maintenance deficient (S. | 2.57 | 1827 |
| 404982 | | | Target Exon | 2.56 | |
| 453968 | AA847843 | Hs.62711 | High mobility group (nonhistone chromoso | 2.56 | 4456 |
| 412673 | AL042957 | Hs.31845 | ESTs | 2.56 | 659 |
| 433848 | AF095719 | Hs.93764 | carboxypeptidase A4 | 2.56 | 2790 5541 |
| 434815 | AF155582 | Hs.46744 | core1 UDP-galactose: N-acetylgalactosamin | 2.55 | 2870 5555 |
| 454110 | AA195509 | Hs.39733 | postsynaptic protein CRIPT | 2.55 | 4469 |
| 418617 | AA225849 | Hs.83419 | ESTs, Moderately similar to ALU8_HUMAN A | 2.55 | 1217 |
| 410507 | AA355288 | | transitional epithelia response protein | 2.55 | 486 |
| 442326 | H92962 | Hs.124813 | hypothetical protein MGC14817 | 2.55 | 3417 |
| 454453 | AW752781 | | hypothetical protein FLJ12614 similar to | 2.54 | 4485 |
| 430316 | NM_000875 | Hs.239176 | insulin-like growth factor 1 receptor | 2.54 | 2470 5445 |
| 442961 | BE614474 | | F-box only protein 22 | 2.53 | 3484 |
| 428484 | AF104032 | Hs.184601 | solute carrier family 7 (cationic amino | 2.53 | 2265 5364 |
| 430375 | AW371048 | Hs.93758 | H4 histone family, member H | 2.53 | 2477 |
| 423250 | BE061916 | Hs.125849 | chromosome 8 open reading frame 2 | 2.53 | 1732 |
| 440006 | AK000517 | Hs.6844 | NALP2 protein; PYRIN-Containing APAF1-li | 2.53 | 3252 5601 |
| 426098 | NM_014906 | Hs.166351 | KIAA1072 protein | 2.53 | 2026 5291 |
| 415857 | AA866115 | Hs.127797 | Homo sapiens cDNA FLJ11381 fis, clone HE | 2.53 | 956 |
| 426108 | AA622037 | Hs.166468 | programmed cell death 5 | 2.52 | 2028 |
| 425159 | NM_004341 | Hs.154868 | carbamoyl-phosphate synthetase 2, aspart | 2.52 | 1931 5249 |
| 422390 | AW450893 | Hs.121830 | ESTs, Weakly similar to T42682 hypotheti | 2.52 | 1638 |
| 411605 | AW006831 | | ESTs | 2.51 | 563 |
| 421690 | AW162667 | Hs.106857 | calbindin 2, (29 kD, calretinin) | 2.51 | 1554 |
| 452827 | AI571835 | Hs.55468 | ESTs | 2.50 | 4350 |
| 431958 | X63629 | Hs.2877 | cadherin 3, type 1, P-cadherin (placenta | 2.50 | 2621 5498 |
| 459376 | BE258770 | | Homo sapiens, clone IMAGE: 3344506, mRNA, | 2.50 | 4667 |
| 452335 | AW188944 | Hs.61272 | ESTs | 2.50 | 4297 |
| 447397 | BE247676 | Hs.18442 | E-1 enzyme | 2.50 | 3856 |
| 426991 | AK001536 | Hs.214410 | Homo sapiens cDNA FLJ10674 fis, clone NT | 2.50 | 2117 |
| 414915 | NM_002462 | Hs.76391 | myxovirus (influenza) resistance 1, homo | 2.50 | 4934 892 |

Pkey: Unique Eos probeset identifier number
ExAccn: Exemplar Accession number, Genbank accession number
UniGeneID: UniGene number
UniGene Title: UniGene gene title
R1: 90th percentile of breast metastases to the brain Als divided by the 90th percentile of normal body tissue Als, where the 15th percentile of all normal body tissue Als was subtracted from the numerator and denominator.
SEQ ID NO(s): SEQ ID number(s) for nucleic acid and protein sequences associated with table entry.

[0341] TABLE 2B

| Pkey | CAT number | Accession |
|---|---|---|
| 400291 | 1314911_1 | AA927862 AA401369 AI873274 |
| 400205 | 2538_1 | NM_006265 D38551 X98294 BM477931 BM461566 AU123557 AU133303 AU134649 AW500421 BM172439 AW500587 AW503665 |
| | | AW504355 AW503640 BM152454 AW505260 AI815984 AW504075 AW500716 AL597310 BC001229 BM474371 AA984202 AU135205 |
| | | BE090841 AW163750 BF747730 BF898637 AI206506 AV660870 AV692110 AW386830 AV656831 N84710 AW993470 BF086802 |
| | | BF758454 BG960772 BF757769 BI870853 BE018627 C75436 AW148744 BF757753 BG622067 BE909924 AA708208 BG530266 BF968015 |
| | | AW992930 BF888862 BG536628 AA143164 AW748953 BG498922 BF885190 BF889005 BF754781 BF800003 BM476529 AI627668 |
| | | AW028126 AL046011 BF590668 AI017447 AA579936 AI367597 AA699622 BE280597 AI124620 AI082548 AW274985 AA677870 AI056767 |
| | | BE551689 AA287642 H94499 AI752427 AI652365 AW002374 AW062651 AA360834 N68822 AU135442 AU125960 Z78334 BE545813 |
| | | AI092115 BF312771 BF242859 BG533616 BG533761 BG164745 BG492433 BM473183 AA172043 AA172069 AU157092 AU151353 |
| | | AU155318 BE302211 AI375022 AA085641 AU157923 H88858 AA132730 AA115113 AA909781 AI475256 AA424206 AW572383 AW084296 |
| | | AI184820 AI469178 AA782432 H92184 AA340562 BF195818 AA852821 AW576342 AA827107 AA173317 AW190014 AI918514 AA729372 |
| | | AA729718 AI055958 AA331424 BE328601 AA515690 BI018896 AW628277 AA748368 AA626222 BG492636 AW380620 BF800058 |
| | | AW370956 AA290909 R25857 BG952995 BF801437 AA172077 AU155890 AU149783 AI720904 AA902936 AA865727 AI470830 AV740677 |
| | | AA142982 AA482485 AU145485 AW576399 AU156042 R63448 BF246427 BE928472 D25910 BF758439 BF968785 BE565238 AA355981 |
| | | AI905607 BG291148 BG533096 BG532888 BF030886 BG613756 BE928471 BG574501 AA187596 AA361196 T95557 BG531446 |
| | | BG527242 BG527513 BG611106 AA085995 BF847252 BG024608 BE540261 BG531236 AL579993 BG108733 BG483503 BG571032 |
| | | BG492505 |
| 407178 | 683007_1 | AW235123 AA195651 |
| 458098 | 23945_1 | AI082245 BE467534 AI797130 BE467063 BE467767 BE218421 AI694996 BE327781 BE327407 BE833829 AA989054 AA459718 BE833855 |
| | | BE550224 AA832519 AF086393 AV733386 BE465409 N29245 W07677 AA482971 BE503548 H18151 AA461301 W79223 W74510 |
| | | AI090689 AL600773 AL600781 N46003 R28075 R34182 BE071550 AW885857 AI276145 AI276696 H97808 N20540 AI468553 |
| 451807 | 17758_2 | BM479185 AL552795 AL577722 BF038888 BM127617 BF510346 AW450652 AA865478 AW449519 BM127314 AI806539 AW449522 |
| | | AA993634 AI827626 AA904788 |
| 428342 | 6712_1 | AK056315 AI015524 AA724079 BI713619 AI377728 AW293682 AI928140 AI092404 AI085630 AA731340 BM469629 AW968804 AA425658 |
| | | AA769094 BF446026 AW118719 AI332765 AW500888 AW576556 AI859571 AW499664 AW614573 AW629495 AW505314 W74704 |
| | | AI356361 AI923640 AW070509 AI521500 AL042095 AA609309 AA761319 AI381489 H45700 AA761333 AW265424 AA909524 AA635311 |
| | | AA649040 AI392620 Z40708 AI985564 AW263513 AA913892 AI693486 AW263502 AI806164 AW291137 BI061872 BI059498 AA134476 AW084888 AA036967 AW370823 T55263 |
| | | BI002756 AA489664 BF827261 W74741 BF963166 |
| 427365 | 1314911_1 | AA927862 AA401369 AI873274 |
| 426878 | 1026976_1 | AL044891 AI908240 AA393080 AW748403 BE069341 BF330573 |
| 433023 | 3970_8 | BE999967 BF438599 AW864793 AI802899 BE815132 AW468888 AI672189 AI052004 BF112024 AA772335 AW275054 AA573845 |
| | | AI144148 AI968683 AA846676 AA927355 H80424 AW973295 R88209 F29868 BE928871 |
| 424399 | 2196_1 | NM_058173 AF414087 W72837 BF742809 AW070916 BE092421 AI905687 AA340069 BE074512 AI905623 AI905633 BG202312 W72838 |
| | | AI139456 BG218084 BE926938 BE186013 AW176044 AW291950 BG185269 BG197186 BG192597 BG183176 BG207535 AI127172 |
| | | BE815819 AI905624 R75793 BG202313 AI905837 BE815853 |
| 419536 | 251846_1 | AA244095 AA603305 AA244183 |
| 415989 | 10194_1 | BC013389 BC017398 AI023543 AA191424 AI267700 AI469633 AW958465 AW953397 AA172056 BE940298 BF909208 BF909980 |
| | | BF095153 BG285837 AI720344 BF541715 AA355086 AA172236 |
| 453160 | 6028_5 | BC009612 NM_003526 BI597616 AV761592 AV760377 AL601008 BI604131 BE645918 BG187760 BG181525 BG210634 BG192999 |
| | | AI263307 AA344186 AW952966 AA033609 AA037562 AA722183 R79452 H70775 BF674991 BE769437 BG007856 AA037483 AW572535 AI143991 AA084581 AA033610 |
| | | AV742510 AV735788 R08336 |
| 443695 | 20416_12 | BE535598 AW204099 AW301249 AA609749 BF917914 AA775742 AV646137 AV646389 AA314747 |
| 451752 | 10408_5 | AB032997 AI141678 AW978722 BE467119 AI761408 BF727385 AW237035 AI934521 BF436248 AI479668 Z40632 AA832081 AW295901 |
| | | BF057835 BE465977 AI621269 BE465983 BF756369 N74056 AI817896 AA716567 AA934774 H62600 H09497 BF943762 BE395335 |
| | | BE883333 |
| 437834 | 294580_1 | BG110129 AW749287 BE535498 AW749299 AW749293 AW749302 AW749298 AW749291 AW749294 AW749289 AW749288 AW749296 |
| | | AA769294 AW749297 AW749295 AW749292 BE002573 |
| 446999 | 70312_1 | AA151520 AI749635 AA149436 BE172702 AW317084 AA922501 AI302818 AI147563 AA789216 AI719336 AW612978 F34536 AI971386 |
| | | AI246525 AI183312 R02554 AI360172 AA634282 AI022935 AA639461 AI086411 AI087086 AA633082 AI590029 AA856582 AW369734 |
| | | AA150042 AA877171 AA456459 AI078529 R83333 AI161298 AA056987 AI350120 H88127 AA258759 AI673598 AA454566 AI342790 |
| | | AI492606 AI159945 AI198009 AI198039 AI142751 AI141403 T81478 AW014110 AI197808 AI927796 AA534936 AA649735 AA649697 |
| | | AI349452 AA719660 AW954285 |
| 447350 | 2267324_1 | AI375572 AI480404 BF430912 T06882 |
| 438869 | 52134_1 | AF075009 R63109 R63068 |
| 418304 | 1093209_1 | BE883520 BI057842 AA215702 AA215703 AA368006 BE006876 BE066555 |
| 400277 | 170_1 | Y00281 NM_002950 BC010839 BC007995 BG675232 BM468552 AL555484 BG831516 BF035300 BG677277 BF852972 BE314901 |
| | | BF850656 AI371816 AA292474 AA375747 AA308414 BM454544 BI333370 BM049921 BI461428 BI465007 BI223401 BE856245 AW821164 |
| | | BF914775 BF914761 AU125835 BI222678 BI091137 BF340536 BM462798 BI224452 BG707915 AL569160 AA443815 AW572867 |
| | | AW363410 BF739268 BG010283 BI013120 BF818845 BF763468 AA305165 AI630370 AA039826 R24906 H02046 T96891 BF981330 |
| | | AW936510 AA478169 H04587 BG166574 BI869342 BE562482 BE539637 AA165089 AL579118 AL553699 BE044054 AW117440 AI520674 |
| | | BF435417 AW245648 AI952404 T29534 AU153459 AU152168 AW591591 AU146918 AI393187 AA478013 AU148143 AI224471 AI640728 |
| | | AI871537 AW264752 N93787 AI189357 AV756134 AI471659 AU147466 AA779206 AU149419 AU149104 AU159135 AA312221 AW445119 |
| | | AW021912 AI799771 F04407 AI285530 AI914643 AW068751 AA513325 AA164627 AA639285 AA569644 T96892 AI923594 BF439180 |
| | | BI770936 BF032438 AU154884 AA682793 AW072992 AU158815 AI884444 AL048031 AU158922 AU152546 AI695187 AL048033 AI245650 |
| | | AU148507 AW467451 BE536868 BF913001 BF062707 AL573082 AW067993 AA523354 BE886727 AI890705 AU159092 AI982693 |
| | | AI817553 AA236729 AI687858 BG163767 AI524675 AI678155 AA127100 AI762661 AU159718 AI469720 AA483627 AW131696 R26868 |
| | | AI199885 AW875614 AW938694 AW578974 BI763988 BG819168 BE874767 BG978292 BE162948 AL555483 AW189719 T56783 AI018819 |
| | | AI476552 BI492837 AI824440 BG996262 AA932887 AI380726 R79530 AA622108 AI262575 T56782 R27437 BE784153 AW129549 |
| | | AI675567 AI866759 BG987935 |
| 406685 | 0_0 | M18728 |
| 407021 | | |
| 441128 | 20932_1 | BC014072 BE328850 AI356567 AI148171 AI022165 BG149661 BF000671 AA233101 AA573721 AA447991 AW016855 AI005068 AA554071 |
| | | BF478215 AA906902 AW014761 BE905651 BE512923 BM047129 AA243852 AA232991 AA127550 AA127551 AA570256 AI473237 |
| | | BF033706 N90525 AW973623 AI359627 BG674574 BE903322 |
| 447349 | 1063443_1 | BE743847 AW809603 BM469626 AI375546 |
| 400295 | 2196_1 | NM_058173 AF414087 W72837 BF742809 AW070916 BE092421 AI905687 AA340069 BE074512 AI905623 AI905633 BG202312 W72838 |
| | | AI139456 BG218084 BE926938 BE186013 AW176044 AW291950 BG185269 BG197186 BG192597 BG183176 BG207535 AI127172 |
| | | BE815819 AI905624 R75793 BG202313 AI905837 BE815853 |
| 420111 | 256912_1 | AW967920 AA262684 AA255652 AA280911 |
| 455286 | 1149378_1 | W27935 AW887403 AW887474 BE144384 BE144386 |
| 424036 | 6226_1 | NM_033445 BC001193 AI885781 BF794032 AA476620 AA810906 AA810905 AI291244 AI885097 AI359708 AI335629 H97396 AI344589 |
| | | AA300377 AA457566 AW771833 BE465621 AI364068 AI364452 AI648505 AI918342 AI928670 AA886580 AL531029 AA886344 AI186419 |
| | | BG329096 BM045465 AL531028 BG437151 BE868021 AA179427 |
| 443845 | 507824_1 | BG394808 BE858105 AI569728 AI590084 BE223011 AW007054 AI554692 AI939398 AW014243 AI088747 AI498970 AI199622 BF115458 |
| | | BI714844 BI715424 AW135964 BG470892 BF347984 AI569769 AI424675 AI939616 BF116017 BF513472 AI828151 AI199676 AW139725 |
| | | AI475044 AI128872 |
| 427521 | 513212_1 | AW973352 BF222929 AW016853 BF059130 AI651829 BE551767 AA558414 AI339359 BF059601 AI961162 AI341422 AI206248 AI206165 |
| | | AA548736 AA768578 AI539081 AW025957 AA736837 N79575 AW594357 AA480892 |
| 424339 | 50559_1 | NM_015720 AF219137 AL534420 AL524055 AL537346 AL538442 BG765888 AL530054 AL525377 BG474596 BG473144 BE251553 |
| | | BG706099 AL538039 BG703131 BE255806 BF805256 F12128 AL566773 BI828686 BF761480 AI204971 BG818818 BI199246 AL534816 |
| | | BF529941 AA324163 AL523285 BG914330 H07952 AL534815 BE769903 AI867802 BM310135 AL533702 BE254484 BF528852 BE867462 |
| | | BE740130 AL134164 AL567115 AL533701 AL524054 AL515904 AL523284 AL568203 AL534419 BF981162 BE257148 AL561833 |
| 439574 | 689966_1 | BG532820 AW246001 AI469788 AI350090 AI446788 BE549330 W84862 AA837988 |
| 438714 | 2576235_1 | AA814859 AI582623 AA814857 |
| 416128 | 3761_6 | AK057803 BG944795 AW411505 AW949210 BI018336 AI366964 BE165417 AA173988 BF965882 AA581362 AI002701 AA340708 |
| | | BF762925 BE005389 |
| 409960 | 39576_1 | BE644758 AI082238 BF940027 AI201079 AI436035 AW275966 AI085394 AI291655 AW070441 AI474134 AI268978 AI769279 AI567682 |
| | | AA693941 BF477668 AW664149 AA283782 BF509538 AW296868 AI268977 AI168133 BM352065 AI262769 BF941976 AI056920 |
| | | AA481861 BF763697 AL565888 BM352383 AA427768 AA385346 AI186988 AA931831 AA134972 BF217480 BF111012 AA908246 |
| | | AA319849 AA318136 AL514271 BF364291 AL515057 AV702312 AA377395 AL544217 AI341000 AW193583 AI350789 AA888338 |
| | | BF945380 AW879092 AA130839 T91066 N92326 AI004389 AA078832 AL572370 W04622 BE314003 AW960808 BM360872 AA319160 |
| | | AA130778 AL514257 |
| 415889 | 12922_1 | NM_052918 AF284756 BE019093 Z42986 BE328250 BE207835 R54516 R24563 H08127 BI522616 AA551620 H07879 AI174481 BF941262 |
| | | BF222810 R54417 AW137766 AI638502 N22373 H08128 R44366 AW272405 AI675836 Z38786 N75618 F02463 AI654047 BI492031 |
| | | AW021081 |
| 407242 | | |
| 449349 | 852_3 | BG679689 AW856638 BM016319 BE327123 AW772128 BE693337 BE938262 BG013928 BF892774 BF894765 BF892588 BF890995 |
| | | BE155056 BE153569 AI934407 BE672538 AW204203 AA778306 BE502974 AI718504 AA778312 AW008224 AW299732 AI911561 |
| | | AI867457 AI521962 AI640173 AI823832 AI288888 BE467960 AI934441 AA483527 AW612103 AI802712 AW342106 AI580299 AW083293 |
| | | AI700874 AW469932 AI583726 AW302136 BE327360 AW614404 C02300 AA934834 F29737 AI262050 AA934619 AA535965 BF196507 |
| | | AA393480 BF086615 AI825386 AA009773 BI333272 T93614 AW770207 BF766665 T64641 W92713 R94110 T89897 BF086603 T93659 |
| | | AA001207 BE539257 BE541430 BE160783 BE155304 BE155454 BF891405 BF762818 |
| 442643 | 2736_1 | BC001588 BC007424 AF016369 NM_004697 BI756186 BE257019 BG500792 BI862776 AL121371 BG574833 AA703250 AA179511 |
| | | AW052006 AI280150 AI914000 AI358319 AI081204 AI082594 AA992449 AI470821 AI655744 AW237529 AA678858 AI984430 BF433055 |
| | | BE467594 BE467573 AA035630 AI289987 AI184802 AI681391 AW592416 AI138377 AI139266 AA961714 AI800163 AA418751 AW451928 |
| | | AA668676 AI273444 AI494387 BE046912 AI276555 BF196021 AA700055 AA609305 AA772596 AI635758 AI635749 H95459 AW610290 |
| | | BE464994 AA527136 BF374802 AI800175 AW195227 AI189676 BF802049 AL513632 AL554911 AL538845 BE297273 AA315321 |
| | | BM451920 BE269268 BE292835 BE018128 BG755713 BM041095 BG677009 AL039691 BF995709 BE735586 BE296453 BG393609 |
| | | BG824453 AL567522 AI745257 AW388641 AW301265 AI141144 AW029280 AU149362 AU152328 AA418960 AL121009 AI890398 |
| | | AL528748 H13050 T47086 BI000575 BF334914 BF109661 R44450 H13259 T47087 AW388646 BF305834 AL577515 BM041600 BE889299 |
| | | BF239768 |
| 407137 | | |
| 426919 | 347372_1 | BI917595 AI203314 AL041228 AV27959 D61361 D82004 BI753157 AA961066 AI990307 BF439651 AI453076 AI376075 AI014836 |
| | | AI018308 AW183530 AA393346 AA935601 AA628633 AI150282 AI028574 AI217182 AA431478 AW087473 AW900295 H50055 AL041229 |
| | | B1917726 |
| 432586 | 6633_1 | BC022881 AU150944 BG750783 AW754175 AW857737 AI911659 AI050036 AA554053 AI826259 AA568548 |
| 410507 | 4450_2 | AK027433 AF117064 NM_013319 BC004468 AI149901 AI150093 AI374696 AI566580 AA779898 BG696067 BG828923 BM051241 |
| | | BM050350 AL580560 AL558826 BG182261 BG194259 BG194258 BF036155 AI026803 AI024570 AA702281 AI566953 AW662600 |
| | | AA463546 F33147 AA357796 BE312357 AL516788 AW958856 BE730432 H85868 AA046292 BG478025 BG112231 BG763623 AA098922 |
| | | BI093481 BE746381 AW962126 AI040821 BG026983 AA355288 BE392859 AA085571 BF875433 BF316280 BG740116 BG166624 |
| 454453 | 8582_4 | BF313069 BE879305 AW752781 AW752727 AW752559 AW752578 AW752584 BF646118 AL545903 BF646115 AL525361 |
| 442961 | 60316_2 | BE966247 BE220885 BE467384 BE350135 BE672094 AI811582 AW665254 AA772731 AI283601 AA417067 AW197746 AI868357 |
| | | AI792143 AA931120 AI758506 AA843761 BE737582 AW379586 N38812 BG567321 H13257 |
| 411605 | 10026_3 | BG256892 H10532 N46614 R52610 AW977696 BM460488 W56819 BI042183 BG977498 BE767451 BF870009 BG477472 R61137 R14274 |
| | | R20259 R09686 BI838226 BF034269 AA429173 BE741829 AW867495 AI123683 AW006831 BE831162 AW452753 AV742717 W86152 |
| | | BF115102 AI633815 BF921562 AA094230 BE092587 W86151 AA526153 AI672156 BF914496 R12579 BF852352 AA699780 T57386 |
| | | BF903022 R09933 AA678298 |
| 459376 | 31010_1 | BC002465 BE254864 BG472164 BE258770 |

Pkey: Unique Eos probeset identifier number
CAT number: Gene cluster number
Accession: Genbank accession numbers

[0342] TABLE 2C

| Pkey | Ref | Strand | Nt_position |
|---|---|---|---|
| 404561 | 9795980 | Minus | 69039-70100 |
| 401451 | 6634068 | Minus | 119926-121272 |
| 401519 | 6649315 | Plus | 157315-157950 |
| 403485 | 9966528 | Plus | 2888-3001, 3198-3532, 3655-4117 |
| 401464 | 6682291 | Minus | 170688-170834 |
| 401866 | 8018106 | Plus | 73126-73623 |
| 404571 | 7249169 | Minus | 112450-112648 |
| 400528 | 6981824 | Plus | 472381-472528, 474170-474277, |
| | | | 475328-47554 |
| 404632 | 9796668 | Plus | 45096-45229 |
| 402496 | 9797769 | Minus | 8615-9103 |
| 400880 | 9931121 | Plus | 29235-29336, 36363-36580 |
| 401558 | 7139678 | Plus | 103510-104090 |
| 401203 | 9743387 | Minus | 172961-173056, 173868-173928 |
| 405366 | 2182280 | Plus | 22478-22632 |
| 405770 | 2735037 | Plus | 61057-62075 |
| 406277 | 5686030 | Minus | 4759-5490 |
| 405558 | 1621110 | Plus | 4502-4644, 5983-6083 |
| 406043 | 6758938 | Plus | 36609-37156 |
| 404580 | 6539738 | Minus | 240588-241589 |
| 404076 | 9931752 | Minus | 3848-3967 |
| 404857 | 5304923 | Plus | 111653-111816, 114925-115007 |
| 402102 | 8117771 | Minus | 174566-174740 |
| 400884 | 9958187 | Minus | 57979-58189 |
| 403006 | 5881378 | Plus | 44108-46264 |
| 404982 | 4432779 | Plus | 30375-30743, 32569-32719, |
| | | | 33698-33808 |

Pkey: Unique number corresponding to an Eos probeset
Ref: Sequence source. The 7 digit numbers in this column are Genbank Identifier (GI) numbers. “Dunham I. et al.” refers to the publication entitled “The DNA sequence of human chromosome 22.” Dunham I. et al., Nature (1999) 402: 489-495.
Strand: Indicates DNA strand from which exons were predicted.
Nt_position: Indicates nucleotide positions of predicted exons.

[0343] TABLE 3A
About 216 genes upregulated in breast metastases to the brain relative to primary breast tumors

| Pkey | ExAccn | UniGeneID | UniGene Title | R1 | SEQ ID NO(s): |
|---|---|---|---|---|---|
| 422756 | AA441787 | Hs.119689 | glycoprotein hormones, alpha polypeptide | 10.29 | 1679 |
| 419875 | AA853410 | Hs.93557 | proenkephalin | 10.01 | 1365 |
| 446292 | AF081497 | Hs.279682 | Rh type C glycoprotein | 6.83 | 3743 5666 |
| 418678 | NM_001327 | Hs.167379 | cancer/testis antigen (NY-ESO-1) | 6.46 | 1226 5024 |
| 429504 | X99133 | Hs.204238 | lipocalin 2 (oncogene 24p3) (NGAL) | 5.86 | 2382 5411 |
| 407168 | R45175 | Hs.117183 | ESTs | 5.62 | 131 |
| 421948 | L42583 | Hs.334309 | keratin 6A | 5.45 | 1583 5130 |
| 415262 | H95572 | Hs.206521 | YME1 (S. cerevisiae)-like 1 | 5.30 | 919 |
| 446787 | U67167 | Hs.315 | mucin 2, intestinal/tracheal | 5.18 | 3787 5677 |
| 419078 | M93119 | Hs.89584 | insulinoma-associated 1 | 4.95 | 1272 5036 |
| 406643 | N77976 | Hs.347939 | hemoglobin, alpha 2 | 4.95 | 81 |
| 410407 | X66839 | Hs.63287 | carbonic anhydrase IX | 4.89 | 474 4846 |
| 421690 | AW162667 | Hs.106857 | calbindin 2, (29 kD, calretinin) | 4.85 | 1554 |
| 428434 | AW363590 | Hs.65551 | Homo sapiens, Similar to DNA segment, Ch | 4.65 | 2256 |
| 430294 | AI538226 | Hs.32976 | guanine nucleotide binding protein 4 | 4.59 | 2463 |
| 409178 | BE393948 | Hs.50915 | kallikrein 5 | 4.47 | 345 |
| 433272 | AB043585 | Hs.100890 | candidate mediator of the p53-dependent | 4.44 | 2752 5534 |
| 431667 | AA812573 | Hs.246787 | ESTs | 4.42 | 2581 |
| 431882 | NM_001426 | Hs.271977 | engrailed homolog 1 | 4.38 | 2612 5493 |
| 428865 | BE544095 | Hs.164960 | BarH-like homeobox 1 | 4.02 | 2314 |
| 453439 | AI572438 | Hs.32976 | guanine nucleotide binding protein 4 | 4.00 | 4406 |
| 443171 | BE281128 | Hs.9030 | TONDU | 3.93 | 3501 |
| 414166 | AW888941 | Hs.75789 | N-myc downstream regulated | 3.92 | 795 |
| 422799 | AI933199 | Hs.120911 | neurexophilin 4 | 3.91 | 1682 |
| 406690 | M29540 | Hs.220529 | carcinoembryonic antigen-related cell ad | 3.82 | 4748 86 |
| 422158 | L10343 | Hs.112341 | protease inhibitor 3, skin-derived (SKAL | 3.71 | 1610 5139 |
| 406791 | AI220684 | Hs.347939 | hemoglobin, alpha 2 | 3.70 | 99 |
| 440475 | AI807671 | Hs.24040 | potassium channel, subfamily K, member 3 | 3.59 | 3291 |
| 407014 | U38268 | | gb: Human cytochrome b pseudogene, partia | 3.56 | 118 |
| 409020 | AA062549 | Hs.21162 | retbindin | 3.53 | 324 |
| 417366 | BE185289 | Hs.1076 | small proline-rich protein 1B (cornifin) | 3.52 | 1087 |
| 457029 | AA397789 | Hs.161803 | ESTs | 3.50 | 4575 |
| 437433 | R74016 | Hs.121581 | ESTs | 3.45 | 3064 |
| 424998 | U58515 | Hs.154138 | chitinase 3-like 2 | 3.34 | 1907 5240 |
| 428342 | AI739168 | | Homo sapiens cDNA FLJ13458 fis, clone PL | 3.32 | 2244 |
| 418951 | F07809 | Hs.89506 | paired box gene 6 (aniridia, keratitis) | 3.20 | 1262 |
| 405452 | | | Target Exon | 3.19 | |
| 428093 | AW594506 | Hs.104830 | ESTs | 3.16 | 2220 |
| 443219 | AI354669 | Hs.187461 | ESTs, Weakly similar to C29149 proline-r | 3.15 | 3509 |
| 440449 | AA885430 | Hs.201925 | Homo sapiens cDNA FLJ13446 tis, clone PL | 3.15 | 3288 |
| 428648 | AF052728 | Hs.188021 | potassium voltage-gated channel, subfami | 3.14 | 2279 5369 |
| 423226 | AA323414 | Hs.146109 | ESTs, Weakly similar to T28937 hypotheti | 3.14 | 1729 |
| 429259 | AA420450 | Hs.292911 | Plakophilin | 3.14 | 2344 |
| 447946 | AI566164 | Hs.277445 | ESTs | 3.13 | 3923 |
| 413597 | AW302885 | Hs.117183 | ESTs | 3.10 | 739 |
| 401151 | | | Target Exon | 3.09 | |
| 419138 | U48508 | Hs.89631 | ryanodine receptor 1 (skeletal) | 3.08 | 1281 5039 |
| 437679 | NM_014214 | Hs.5753 | inositol(myo)-1(or 4)-monophosphatase 2 | 3.07 | 3082 5590 |
| 406947 | L10403 | Hs.3134 | DNA-binding protein amplifying expressio | 3.06 | 113 4759 |
| 425057 | AA826434 | Hs.1619 | achaete-scute complex (Drosophila) homol | 3.04 | 1915 |
| 443537 | D13305 | Hs.203 | cholecystokinin B receptor | 3.03 | 3528 5629 |
| 403364 | | | Target Exon | 3.02 | |
| 406716 | AW148546 | Hs.169476 | glyceraldehyde-3-phosphate dehydrogenase | 2.99 | 93 |
| 422997 | BE018212 | Hs.122908 | DNA replication factor | 2.96 | 1708 |
| 422168 | AA586894 | Hs.112408 | S100 calcium-binding protein A7 (psorias | 2.96 | 1612 |
| 449077 | AW262836 | Hs.252844 | ESTs | 2.95 | 4033 |
| 422010 | AA302049 | Hs.31181 | Homo sapiens cDNA: FLJ23230 fis, clone C | 2.94 | 1593 |
| 422256 | M64673 | Hs.1499 | heat shock transcription factor 1 | 2.94 | 1622 5144 |
| 426484 | AF104032 | Hs.184601 | solute carrier family 7 (cationic amino | 2.94 | 2265 5364 |
| 412560 | R24601 | | CCR4-NOT transcription complex, subunit | 2.91 | 645 |
| 447349 | AI375546 | | gb: tc23d04.x1 Soares_total_fetus_Nb2HF8_{—} | 2.91 | 3848 |
| 406016 | | | Target Exon | 2.90 | |
| 425371 | D49441 | Hs.155981 | mesothelin | 2.89 | 1957 5259 |
| 443672 | AA323362 | Hs.9667 | butyrobetaine (gamma), 2-oxoglutarate di | 2.88 | 3536 |
| 430147 | R60704 | Hs.234434 | hairy/enhancer-of-split related with YRP | 2.87 | 2447 |
| 403246 | | | Target Exon | 2.86 | |
| 424047 | AI868401 | Hs.138248 | hypothetical protein YH95C04 | 2.85 | 1795 |
| 450256 | AA286887 | Hs.24724 | MFH-amplified sequences with leucine-ric | 2.85 | 4120 |
| 452800 | U10991 | Hs.30660 | G2 protein | 2.84 | 4345 5763 |
| 435408 | H07897 | Hs.4302 | ESTs, Weakly similar to T29299 hypotheti | 2.82 | 2912 |
| 434567 | AK000600 | Hs.3972 | NeuAc-alpha-2,3-Gal-beta-1,3-GalNAc-alph | 2.81 | 2848 5550 |
| 450149 | AW969781 | Hs.132863 | Zic family member 2 (odd-paired Drosophi | 2.81 | 4106 |
| 409456 | U34962 | Hs.54473 | cardiac-specific homeo box | 2.79 | 374 4825 |
| 429986 | AF092047 | Hs.227277 | sine oculis homeobox (Drosophila) homolo | 2.79 | 2434 5431 |
| 412383 | AW947577 | | gb: RC0-MT0004-140300-031-b09 MT0004 Homo | 2.78 | 628 |
| 431130 | NM_006103 | Hs.2719 | HE4; epididymis-specific, whey-acidic pr | 2.77 | 2533 5470 |
| 445707 | AI248720 | Hs.114390 | ESTs | 2.75 | 3695 |
| 449709 | BE410592 | Hs.23918 | hypothetical protein PP5395 | 2.74 | 4077 |
| 403140 | | | Target Exon | 2.74 | |
| 453309 | AI791809 | Hs.32949 | defensin, beta 1 | 2.73 | 4393 |
| 423166 | AB035334 | Hs.144181 | ESTs | 2.72 | 1723 5172 |
| 413027 | NM_002885 | Hs.75151 | RAP1, GTPase activating protein 1 | 2.71 | 4891 690 |
| 447866 | AW444754 | Hs.202095 | ESTs | 2.70 | 3915 |
| 437044 | AL035864 | Hs.69517 | differentially expressed in Fanconi's an | 2.70 | 3031 |
| 403669 | | | Target Exon | 2.68 | |
| 420783 | AI659838 | Hs.99923 | lectin, galactoside-binding, soluble, 7 | 2.66 | 1453 |
| 406685 | M18728 | | gb: Human nonspecific crossreacting antig | 2.64 | 4745 83 |
| 405151 | | | Target Exon | 2.62 | |
| 426006 | R49031 | Hs.22627 | ESTs | 2.61 | 2019 |
| 424066 | Z99348 | Hs.112461 | ESTs, Weakly similar to I38022 hypotheti | 2.61 | 1798 |
| 424250 | AF073310 | Hs.143648 | insulin receptor substrate 2 | 2.61 | 1820 5205 |
| 407737 | R49187 | Hs.6659 | ESTs | 2.60 | 186 |
| 448296 | BE622756 | Hs.10949 | Homo sapiens cDNA FLJ14162 fis, clone NT | 2.60 | 3956 |
| 440232 | AI766925 | Hs.112554 | ESTs | 2.60 | 3272 |
| 420767 | AF072711 | Hs.99918 | carboxyl ester lipase (bile salt-stimula | 2.59 | 1452 5086 |
| 420230 | AL034344 | Hs.284186 | forkhead box C1 | 2.58 | 1398 5069 |
| 406835 | AI318327 | | gb: ta42c10.x1 NCI_CGAP_Lu25 Homo sapiens | 2.58 | 102 |
| 413063 | AL035737 | Hs.75184 | chitinase 3-like 1 (cartilage glycoprote | 2.58 | 692 |
| 443845 | AI590084 | | ESTs, Weakly similar to A47161 Mac-2-bin | 2.57 | 3560 |
| 412968 | AW500508 | Hs.75102 | alanyl-tRNA synthetase | 2.57 | 686 |
| 452786 | R61362 | Hs.106642 | ESTs, Weakly similar to T09052 hypotheti | 2.57 | 4344 |
| 425352 | NM_000939 | Hs.1897 | proopiomelanocortin (adrenocorticotropin | 2.56 | 1951 5256 |
| 419767 | W73306 | Hs.306668 | Homo sapiens cDNA FLJ14089 fis, clone MA | 2.55 | 1361 |
| 437142 | AI791617 | Hs.145068 | ESTs, Moderately similar to A46010 X-lin | 2.55 | 3036 |
| 401590 | | | Target Exon | 2.55 | |
| 407147 | D20425 | | gb: HUMGS01399 Human promyelocyte Homo sa | 2.55 | 130 |
| 422559 | AW247696 | Hs.155839 | hypothetical protein MGC12934 | 2.55 | 1656 |
| 426686 | AI362802 | Hs.171814 | parathymosin | 2.54 | 2087 |
| 412452 | AA215731 | | suppression of tumorigenicity 5 | 2.54 | 634 |
| 407242 | M18728 | | gb: Human nonspecific crossreacting antig | 2.53 | 142 4766 |
| 446342 | BE298665 | Hs.14846 | solute carrier family 7 (cationic amino | 2.53 | 3746 |
| 424286 | AA338285 | Hs.90744 | proteasome (prosome, macropain) 265 subu | 2.53 | 1824 |
| 412796 | U52426 | Hs.74597 | stromal interaction molecule 1 | 2.52 | 4886 670 |
| 419589 | AW973708 | Hs.201925 | Homo sapiens cDNA FLJ13446 fis, clone PL | 2.51 | 1336 |
| 433701 | AW445023 | Hs.15155 | ESTs | 2.49 | 2782 |
| 429538 | BE182592 | Hs.139322 | small proline-rich protein 2A | 2.48 | 2384 |
| 404645 | | | C9001365*: gi\|2921630\|gb\|AAC39612.1\| (U86 | 2.48 | |
| 422726 | U11690 | Hs.1572 | faciogenital dysplasia (Aarskog-Scott sy | 2.48 | 1677 5157 |
| 424347 | AA723883 | Hs.302446 | hypothetical protein MGC10334 | 2.47 | 1834 |
| 414580 | BE386918 | | gb: 601275386F1 NIH_MGC_20 Homo sapiens c | 2.46 | 848 |
| 439477 | W69813 | Hs.58042 | Homo sapiens GDNF family receptor alpha | 2.45 | 3210 |
| 422424 | AI186431 | Hs.296638 | prostate differentiation factor | 2.45 | 1645 |
| 434861 | AA206153 | Hs.4209 | mitochondrial ribosomal protein L37 | 2.45 | 2875 |
| 421661 | BE281303 | Hs.299148 | hypothetical protein FLJ21801 | 2.45 | 1551 |
| 406102 | | | gb: RC3-HT0273-120200-014-c07 HT0273 Homo | 2.44 | |
| 424463 | AW195353 | Hs.119903 | ESTs | 2.44 | 1850 |
| 431912 | AI660552 | | ESTs, Weakly similar to A56154 AbI subst | 2.44 | 2615 |
| 454453 | AW752781 | | hypothetical protein FLJ12614 similar to | 2.43 | 4485 |
| 406718 | AA505525 | Hs.169476 | glyceraldehyde-3-phosphate dehydrogenase | 2.43 | 94 |
| 438364 | AK000860 | Hs.6191 | hypothetical protein DKFZp762I166 | 2.42 | 3135 |
| 436608 | AA628980 | Hs.192371 | down syndrome critical region protein DS | 2.42 | 2997 |
| 428182 | BE386042 | Hs.293317 | ESTs, Weakly similar to GGC1_HUMAN G ANT | 2.42 | 2227 |
| 419648 | T73661 | Hs.91877 | thyroid hormone responsive SPOT14 (rat) | 2.42 | 1344 |
| 426067 | AW664691 | Hs.97053 | ESTs | 2.41 | 2022 |
| 437026 | AW976573 | | ESTs | 2.41 | 3029 |
| 405003 | | | Target Exon | 2.40 | |
| 429749 | AI685174 | Hs.22293 | ESTs, Weakly similar to MUC2_HUMAN MUCIN | 2.40 | 2413 |
| 413934 | U03056 | Hs.75619 | hyaluronoglucosaminidase 1 | 2.40 | 4909 764 |
| 426514 | BE616633 | Hs.170195 | bone morphogenetic protein 7 (osteogenic | 2.39 | 2073 |
| 436557 | W15573 | Hs.5027 | ESTs, Weakly similar to A47582 B-cell gr | 2.38 | 2993 |
| 406175 | | | C1002017*: gi\|6678229\|ref\|NP_033349.1\|T- | 2.38 | |
| 414719 | U66619 | Hs.71622 | SWI/SNF related, matrix associated, acti | 2.38 | 4926 869 |
| 400914 | | | ENSP00000228091*: Calcium-binding protein | 2.37 | |
| 449853 | AF006823 | Hs.24040 | potassium channel, subfamily K, member 3 | 2.36 | 4089 5724 |
| 401612 | | | C4000495: gi\|6677633\|ref\|NP_033595.1\|zin | 2.36 | |
| 457739 | AF161337 | Hs.283928 | Homo sapiens HSPC074 mRNA, partial cds | 2.36 | 4600 5815 |
| 456736 | AW248217 | Hs.1619 | achaete-scute complex (Drosophila) homol | 2.36 | 4558 |
| 407119 | AA167051 | Hs.252040 | EST, Moderately similar to ZN91_HUMAN ZI | 2.34 | 126 |
| 427715 | BE245274 | Hs.180428 | KIAA1181 protein | 2.34 | 2188 |
| 402961 | | | Homo sapiens mRNA; cDNA DKFZp761E0611 (f | 2.33 | |
| 447544 | AA401573 | Hs.288284 | hypothetical protein FLJ22378 | 2.33 | 3878 |
| 416135 | AW473656 | Hs.227277 | ESTs | 2.33 | 975 |
| 427722 | AK000123 | Hs.180479 | hypothetical protein FLJ20116 | 2.33 | 2190 5344 |
| 444590 | AA457456 | | hypothetical protein FLJ20435 | 2.32 | 3611 |
| 432886 | BE159028 | Hs.279704 | chromatin accessibility complex 1 | 2.32 | 2708 |
| 409108 | AA339443 | Hs.48793 | sialyltransferase 6 (N-acetyllacosaminid | 2.31 | 334 |
| 411410 | R20693 | Hs.69954 | laminin, gamma 3 | 2.31 | 553 |
| 403828 | | | C4000447*: gi\|7705570\|ref\|NP_038851.1\|KI | 2.31 | |
| 426350 | NM_003245 | Hs.2022 | transglutaminase 3 (E polypeptide, prote | 2.31 | 2056 5301 |
| 431745 | AW972448 | Hs.163425 | Novel FGENESH predicted cadherin repeat | 2.31 | 2595 |
| 424462 | AU076666 | Hs.148101 | serum constituent protein | 2.30 | 1849 |
| 430176 | AL161995 | Hs.234775 | neurturin | 2.30 | 2450 5438 |
| 425707 | AF115402 | Hs.11713 | E74-like factor 5 (ets domain transcript | 2.30 | 1992 5277 |
| 440313 | AL050060 | Hs.7158 | DKFZP566H073 protein | 2.30 | 3280 5605 |
| 417017 | AA976064 | Hs.180842 | ribosomal protein L13 | 2.30 | 1052 |
| 426207 | BE390657 | Hs.30026 | HSPC182 protein | 2.29 | 2038 |
| 424142 | AI678727 | Hs.75106 | clusterin (complement lysis inhibitor, S | 2.29 | 1810 |
| 440747 | AW297226 | Hs.137840 | ESTs, Moderately similar to SIX4_HUMAN H | 2.29 | 3316 |
| 421574 | AJ000152 | Hs.105924 | defensin, beta 2 | 2.28 | 1540 5117 |
| 402943 | | | C20000263: gi\|11436283\|ref\|XP_006959.1\| g | 2.28 | |
| 402160 | | | Target Exon | 2.28 | |
| 425140 | AB014567 | Hs.154740 | TBP-interacting protein | 2.28 | 1926 5247 |
| 435124 | AA725362 | Hs.120456 | ESTs | 2.28 | 2897 |
| 416733 | BE243319 | Hs.79672 | KIAA0652 gene product | 2.27 | 1018 |
| 459299 | BE094291 | Hs.155651 | hepatocyte nuclear factor 3, beta | 2.27 | 4665 |
| 452833 | BE559681 | Hs.30736 | KIAA0124 protein | 2.27 | 4351 |
| 429578 | AI969028 | Hs.99389 | ESTs | 2.27 | 2389 |
| 417900 | BE250127 | Hs.82906 | CDC20 (cell division cycle 20, S. cerevi | 2.27 | 1136 |
| 429469 | M64590 | Hs.27 | glycine dehydrogenase (decarboxylating; | 2.26 | 2374 5408 |
| 433472 | AI541246 | Hs.3343 | phosphoglycerate dehydrogenase | 2.26 | 2765 |
| 429849 | U33053 | Hs.2499 | protein kinase C-like 1 | 2.26 | 2418 5427 |
| 402463 | | | NM_014624: Homo sapiens S100 calcium-bind | 2.26 | 34 4704 |
| 408595 | AI925900 | Hs.178715 | ESTs, Weakly similar to TRHY_HUMAN TRICH | 2.26 | 282 |
| 427486 | AA974433 | | fibroblast growth factor 4 (heparin secr | 2.26 | 2156 |
| 426842 | NM_004210 | Hs.172700 | neuralized (Drosophila)-like | 2.26 | 2106 5324 |
| 442620 | C00138 | Hs.8535 | Homo sapiens mRNA for KIAA1668 protein, | 2.25 | 3456 |
| 409435 | AI810721 | Hs.95424 | ESTs | 2.25 | 370 |
| 418399 | AF131781 | Hs.84753 | hypothetical protein FLJ12442 | 2.25 | 1196 5014 |
| 411006 | AW813193 | Hs.17767 | KIAA1554 protein | 2.25 | 526 |
| 418329 | AW247430 | Hs.84152 | cystathionine-beta-synthase | 2.25 | 1186 |
| 429056 | AW138568 | Hs.104965 | ESTs | 2.25 | 2330 |
| 406840 | AW161940 | Hs.2186 | eukaryotic translation elongation factor | 2.25 | 103 |
| 410553 | AW016824 | Hs.272068 | hypothetical protein MGC14128 | 2.25 | 491 |
| 421502 | AF111856 | Hs.105039 | solute carrier family 34 (sodium phospha | 2.25 | 1527 5110 |
| 430937 | X53463 | Hs.2704 | glutathione peroxidase 2 (gastrointestin | 2.24 | 2522 5466 |
| 457485 | AW081072 | Hs.115960 | KIAA0939 protein | 2.24 | 4593 |
| 432241 | AI937060 | Hs.6298 | KIAA1151 protein | 2.24 | 2648 |
| 438821 | AA826425 | Hs.192375 | ESTs | 2.24 | 3168 |
| 453863 | X02544 | Hs.572 | orosomucoid 1 | 2.23 | 4438 5786 |
| 434844 | AF157116 | Hs.22350 | hypothetical protein LOC56757 | 2.23 | 2873 |
| 414075 | U11862 | Hs.75741 | amiloride binding protein 1 (amine oxida | 2.23 | 4913 785 |
| 417515 | L24203 | Hs.82237 | ataxia-telangiectasia group D-associated | 2.22 | 1099 4988 |
| 407792 | AI077715 | Hs.39384 | putative secreted ligand homologous to f | 2.22 | 196 |
| 430569 | AF241254 | Hs.178098 | angiotensin I converting enzyme (peptidy | 2.22 | 2496 5456 |
| 449842 | AA256233 | Hs.112529 | ESTs | 2.21 | 4087 |
| 436877 | AA931484 | Hs.121255 | ESTs, Weakly similar to T21069 hypotheti | 2.21 | 3017 |
| 421267 | BE314724 | Hs.103081 | ribosomal protein S6 kinase, 70 kD, polyp | 2.21 | 1500 |
| 448571 | AA486794 | Hs.66915 | ESTs, Weakly similar to 16.7 Kd protein [ | 2.21 | 3986 |
| 408393 | AW015318 | Hs.23165 | ESTs | 2.21 | 263 |
| 425883 | AL137708 | Hs.161031 | Homo sapiens mRNA; cDNA DKFZp434K0322 (f | 2.21 | 2009 5281 |
| 406919 | M88359 | | gb: Homo sapiens DNA-binding protein (ZNF | 2.21 | 108 4754 |
| 411261 | AW834655 | | gb: MR2-TT0014-291199-017-g11 TT0014 Homo | 2.21 | 543 |
| 432941 | W04803 | Hs.279851 | hypothetical protein FLJ10241 | 2.21 | 2713 |
| 436409 | AJ238982 | Hs.183656 | VNN3 protein | 2.20 | 2983 5579 |
| 444081 | AW593028 | Hs.175939 | ESTs | 2.20 | 3573 |
| 447472 | AW207347 | Hs.211101 | ESTs | 2.20 | 3864 |

Pkey: Unique Eos probeset identifier number
ExAccn: Exemplar Accession number, Genbank accession number
UniGeneID: UniGene number
UniGene Title: UniGene gene title
R1: 90th percentile of breast metastases to the brain Ais divided by the 90th percentile of breast tumor Als, where the 15th percentile of all normal body Als was subtracted from the numerator and denominator.
SEQ ID NO(s): SEQ ID number(s) for nucleic acid and protein sequences associated with table entry.

[0344] TABLE 3B

| Pkey | CAT number | Accession |
|---|---|---|
| 428342 | 6712_1 | AK056315 AI015524 AA724079 BI713619 AI377728 AW293682 AI928140 AI092404 AI085630 AA731340 |
| | | BM469629 AW968804 AA425658 AA769094 BF446026 AW118719 AI332765 AW500888 AW576556 AI859571 |
| | | AW499664 AW614573 AW629495 AW505314 W74704 AI356361 AI923640 AW070509 AI521500 |
| | | AL042095 AA609309 AA761319 AI381489 H45700 AA761333 AW265424 AA909524 AA635311 |
| | | AA649040 AI392620 Z40708 AI985564 AW263513 AA913892 AI693486 AW263502 AI806164 |
| | | AW291137 BI061872 BI059498 AA134476 AW084888 AA036967 AW370823 |
| | | T55263 BI002756 AA489664 BF827261 W74741 BF963166 |
| 412560 | 72553_1 | BF002870 AI003925 AI082639 AA194383 AA702993 AI767866 AL575096 BF593252 AI948584 AI678666 |
| | | BI963722 AI765219 AA620965 BE671938 AI004689 AI004690 AI990303 AI127228 BE856290 AW203978 |
| | | AI934786 AI770075 AI144132 AA812597 AI813349 AI142908 BE671242 AI208243 H82735 BF115200 |
| | | AJ345984 BE044308 F32992 AJ346047 F24958 AJ346565 AJ346456 F18071 R24502 BI830577 |
| | | BI222716 H83611 AA507760 BE463806 AA194467 AI865963 BF434962 C04894 AA813511 |
| | | AA112966 N89963 |
| 447349 | 1063443_1 | BE743847 AW809603 BM469626 AI375546 |
| 412383 | 1174261_1 | AW947574 AW947732 AW947577 AW947576 AW947733 AW947734 |
| 406685 | 0_0 | M18728 |
| 406835 | 0_0 | AI318327 AI318328 AI318495 |
| 443845 | 507824_1 | BG394808 BE858105 AI569728 AI590084 BE223011 AW007054 AI554692 AI939398 AW014243 AI088747 |
| | | AI498970 AI199622 BF115458 BI714844 BI715424 AW135964 BG470892 BF347984 AI569769 AI424675 |
| | | AI939616 BF116017 BF513472 AI828151 AI199676 AW139725 AI475044 AI128872 |
| 412452 | 71091_1 | BE796667 BF330981 BE394193 Z45547 BG490525 F35734 AA130708 AA577072 AA446587 AA215665 |
| | | AA978209 BG740729 BG746810 BE298184 AI356291 AI671975 AI818924 AV715722 AI078381 BI142391 |
| | | AI201085 AI198283 AI077572 AI694848 AW016425 BM456416 AI277223 AW771476 F26140 AA102778 |
| | | AW025780 R44726 AA761079 AI581346 AI991909 BM005939 BE537999 BG469717 AA114156 |
| | | BF437200 BE774942 |
| 414580 | 623093_1 | BG333973 BE385437 BE408833 BE387650 |
| 431912 | 610_10 | BI763666 BI517886 BI759051 AI688604 AI660552 BF588523 AW004785 AW295479 BF591117 |
| | | BF002672 BF064073 AA594441 AI380340 AI700219 AI659950 AI688540 AW296326 |
| 454453 | 8582_4 | BF313069 BE879305 AW752781 AW752727 AW752559 AW752578 AW752584 BF846118 |
| | | AL545903 BF846115 AL525361 |
| 437026 | 1240260_1 | AW976573 AA742335 AA830000 |
| 444590 | 8582_1 | BE907414 BI084902 AA907921 AI567715 AA653738 AA047537 AI554180 AI183767 AW440532 |
| | | AI806052 AI148988 AA595689 AI185031 AI174482 AI674395 AA292091 AA868833 |
| | | AI675517 AA481678 BF431759 AI698771 BE833514 AI742767 BF109855 F36782 F35533 |
| | | AU149106 AI914985 AI143516 AW022296 AW118286 AI041751 AI499755 AI198299 AA862671 |
| | | AI358871 AA160379 AA481440 AI003599 F28806 AA449176 BE871427 AA457456 |
| | | BF906432 AA722113 AA022499 BI252800 T64216 BE872273 AA579472 AA355128 |
| | | AA373128 T64403 F37911 |
| 427486 | 684159_1 | BF510715 BE673055 BE464111 AW590620 AI637939 AA404324 AW236441 AI650952 |
| | | BF056796 AA974433 |
| 411261 | 1074276_1 | AW834670 AW834476 AW834691 AW834604 AW834655 AW834623 |

Pkey: Unique Eos probeset identifier number
CAT number: Gene cluster number
Accession: Genbank accession numbers

[0345] TABLE 3C

| Pkey | Ref | Strand | Nt_position |
|---|---|---|---|
| 405452 | 7656638 | Minus | 93876-94275 |
| 401151 | 9438288 | Plus | 30848-31228 |
| 403364 | 8571785 | Plus | 120351-120465 |
| 406016 | 8272661 | Plus | 41341-41940 |
| 403246 | 7637831 | Minus | 143547-143654, 143741-143900 |
| 403140 | 9230855 | Plus | 69761-69894, 70628-70889 |
| 403669 | 7259739 | Minus | 86103-86267 |
| 405151 | 7107980 | Minus | 45826-46035 |
| 401590 | 9966320 | Minus | 33547-33649 |
| 404645 | 9796894 | Minus | 19384-20220 |
| 406102 | 9124026 | Minus | 242917-243390 |
| 405003 | 6957544 | Minus | 129031-130073 |
| 406175 | 7249177 | Minus | 31058-31165 |
| 400914 | 3779013 | Plus | 116586-116729, 117860-117986 |
| 401612 | 7705041 | Minus | 100597-100830 |
| 402961 | 9453790 | Plus | 42966-43193, 53444-53524 |
| 403828 | 9838214 | Plus | 31755-32148 |
| 402943 | 6456831 | Plus | 38467-39068 |
| 402160 | 8516165 | Plus | 166063-166354 |
| 402463 | 9796896 | Minus | 8818-8952 |

Pkey: Unique number corresponding to an Eos probeset
Ref: Sequence source. The 7 digit numbers in this column are Genbank Identifier (GI) numbers. “Dunham I. et al.” refers to the publication entitled “The DNA sequence of human chromosome 22.” Dunham I. et al., Nature (1999) 402: 489-495.
Strand: Indicates DNA strand from which exons were predicted.
Nt_position: Indicates nucleotide positions of predicted exons.

[0346] TABLE 4A
About 350 genes downregulated in breast metastases to the brain relative to primary breast tumors

| Pkey | ExAccn | UniGeneID | UniGene Title | R1 | SEQ ID NO(s): |
|---|---|---|---|---|---|
| 418026 | BE379727 | Hs.83213 | fatty acid binding protein 4, adipocyte | 34.20 | 1148 |
| 428398 | AI249368 | Hs.98558 | ESTs | 29.08 | 2249 |
| 452426 | AI904823 | Hs.31297 | duodenal cytochrome b | 19.50 | 4306 |
| 441591 | AF055992 | Hs.183 | Duffy blood group | 16.67 | 3358 5617 |
| 447205 | BE617015 | Hs.11006 | ESTs, Moderately similar to T17372 plasm | 16.36 | 3829 |
| 407694 | U77594 | Hs.37682 | retinoic acid receptor responder (tazaro | 15.21 | 181 4779 |
| 447990 | BE048821 | Hs.20144 | small inducible cytokine subfamily A (Cy | 15.00 | 3933 |
| 442321 | AF207664 | Hs.8230 | a disintegrin-like and metalloprotease ( | 14.98 | 3416 5619 |
| 420202 | AL036557 | Hs.95910 | putative lymphocyte G0/G1 switch gene | 14.47 | 1394 |
| 416950 | AL049798 | Hs.80552 | dermatopontin | 14.39 | 1042 4972 |
| 447225 | R62676 | Hs.17820 | Rho-associated, coiled-coil containing p | 14.13 | 3831 |
| 422109 | S73265 | Hs.1473 | gastrin-releasing peptide | 13.57 | 1604 5138 |
| 428411 | AW291464 | Hs.10338 | ESTs | 13.45 | 2251 |
| 450701 | H39960 | Hs.288467 | hypothetical protein XP_098151 (leucine- | 12.79 | 4152 |
| 450239 | BE541781 | Hs.24697 | cytidine monophosphate-N-acetylneuramini | 12.51 | 4116 |
| 431089 | BE041395 | | ESTs, Weakly similar to unknown protein | 11.92 | |
| 453655 | AW960427 | Hs.342874 | transforming growth factor, beta recepto | 11.87 | 4421 |
| 424206 | NM_003734 | Hs.198241 | amine oxidase, copper containing 3 (vasc | 11.82 | 1815 5203 |
| 443932 | AW888222 | Hs.9973 | tensin | 11.75 | 3563 |
| 412810 | M21574 | Hs.74615 | platelet-derived growth factor receptor, | 11.35 | 4888 672 |
| 422087 | X58968 | Hs.111301 | matrix metalloproteinase 2 (gelatinase A | 11.22 | 1600 |
| 418058 | AW161552 | Hs.83381 | guanine nucleotide binding protein 11 | 11.20 | 1154 |
| 415274 | AF001548 | Hs.78344 | myosin, heavy polypeptide 11, smooth mus | 11.03 | 4944 921 |
| 451583 | AI653797 | Hs.24133 | ESTs | 10.88 | 4230 |
| 452669 | AA216363 | Hs.262958 | hypothetical protein DKFZp434B044 | 10.54 | 4332 |
| 413624 | BE177019 | Hs.75445 | SPARC-like 1 (mast9, hevin) | 10.42 | 741 |
| 442561 | NM_013450 | Hs.8383 | bromodomain adjacent to zinc finger doma | 10.20 | 3442 5621 |
| 431971 | BE274907 | Hs.77385 | myosin, light polypeptide 6, alkali, smo | 10.16 | 2622 |
| 446808 | AA703226 | Hs.16193 | Homo sapiens mRNA; cDNA DKFZp586B211 (fr | 9.97 | 3790 |
| 420105 | AW015571 | Hs.32244 | ESTs, Weakly similar to FMOD_HUMAN FIBRO | 9.97 | 1385 |
| 408741 | M73720 | Hs.646 | carboxypeptidase A3 (mast cell) | 9.77 | 300 4805 |
| 428046 | AW812795 | Hs.337534 | ESTs, Moderately similar to I38022 hypot | 9.75 | 2217 |
| 453299 | W44626 | Hs.30627 | ESTs | 9.58 | 4392 |
| 453874 | AW591783 | Hs.36131 | collagen, type XIV, alpha 1 (undulin) | 9.55 | 4440 |
| 406964 | M21305 | | FGENES predicted novel secreted protein | 9.47 | 114 4760 |
| 425701 | AA361850 | Hs.240443 | Human clone 137308 mRNA, partial cds | 9.35 | 1990 |
| 417365 | D50683 | Hs.82028 | transforming growth factor, beta recepto | 9.02 | 1086 4982 |
| 408491 | AI088063 | Hs.7882 | ESTs | 9.01 | 272 |
| 414496 | W73853 | | ESTs | 8.93 | 837 |
| 415550 | L13720 | Hs.78501 | growth arrest-specific 6 | 8.91 | 4949 936 |
| 421823 | N40850 | Hs.28625 | ESTs | 8.82 | 1568 |
| 424634 | NM_003613 | Hs.151407 | cartilage intermediate layer protein, nu | 8.77 | 1866 5222 |
| 432485 | N90866 | Hs.276770 | CDW52 antigen (CAMPATH-1 antigen) | 8.76 | 2672 |
| 422287 | F16365 | Hs.114346 | cytochrome c oxidase subunit VIIa polype | 8.66 | 1628 |
| 416931 | D45371 | Hs.80485 | adipose most abundant gene transcript 1 | 8.65 | 1039 4970 |
| 442560 | AA365042 | Hs.325531 | ESTs, Weakly similar to 2004399A chromos | 8.58 | 3441 |
| 406800 | AA505535 | | gb: nh84h10.s1 NCI_CGAP_Br1.1 Homo sapien | 8.57 | 100 |
| 413856 | D13639 | Hs.75586 | cyclin D2 | 8.55 | 4907 758 |
| 456938 | X52509 | Hs.161640 | tyrosine aminotransferase | 8.53 | 4568 5805 |
| 447371 | AA334274 | Hs.18368 | DKFZP564B0769 protein | 8.42 | 3851 |
| 453767 | AB011792 | Hs.35094 | extracellular matrix protein 2, female o | 8.34 | 4430 5782 |
| 437176 | AW176909 | Hs.42346 | calcineurin-binding protein calsarcin-1 | 8.32 | 3042 |
| 453676 | AW853745 | Hs.286035 | hypothetical protein FLJ22686 | 8.32 | 4423 |
| 414541 | BE293116 | Hs.76392 | aldehyde dehydrogenase 1 family, member | 8.04 | 842 |
| 453355 | AW295374 | Hs.31412 | myopodin | 7.91 | 4400 |
| 413190 | AA151802 | Hs.40368 | adaptor-related protein complex 1, sigma | 7.87 | 698 |
| 446141 | AW631255 | Hs.324470 | L-3-hydroxyacyl-Coenzyme A dehydrogenase | 7.77 | 3726 |
| 421296 | NM_002666 | Hs.103253 | perilipin | 7.74 | 1504 5100 |
| 430410 | AF099144 | Hs.347933 | tryptase beta 1 | 7.68 | 2484 5451 |
| 427373 | AB007972 | Hs.130760 | myosin phosphatase, target subunit 2 | 7.68 | 2149 |
| 422550 | BE297626 | Hs.296049 | microfibrillar-associated protein 4 | 7.65 | 1655 |
| 444933 | NM_016245 | Hs.12150 | retinal short-chain dehydrogenase/reduct | 7.63 | 3641 5648 |
| 420255 | NM_007289 | Hs.1298 | membrane metallo-endopeptidase (neutral | 7.60 | 1400 5070 |
| 425809 | AA370362 | Hs.57958 | EGF-TM7-latrophilin-related protein | 7.51 | 1997 |
| 449746 | AI668594 | Hs.176588 | ESTs, Weakly similar to CP4Y_HUMAN CYTOC | 7.48 | 4080 |
| 436394 | AA531187 | Hs.126705 | ESTs | 7.48 | 2982 |
| 448429 | D17408 | Hs.21223 | calponin 1, basic, smooth muscle | 7.46 | 3969 5709 |
| 427585 | D31152 | Hs.179729 | collagen, type X, alpha 1 (Schmid metaph | 7.37 | 2169 |
| 406387 | | | Target Exon | 7.37 | |
| 453180 | N46243 | Hs.110373 | ESTs, Highly similar to T42626 secreted | 7.36 | 4383 |
| 454035 | AW368993 | Hs.323748 | Homo sapiens clone CDABP0086 mRNA sequen | 7.33 | 4463 |
| 435684 | NM_001290 | Hs.4980 | LIM domain binding 2 | 7.33 | 2937 5568 |
| 416157 | NM_003243 | Hs.342874 | transforming growth factor, beta recepto | 7.32 | 4956 977 |
| 435359 | T60843 | Hs.189679 | ESTs | 7.31 | 2909 |
| 452390 | AI864142 | Hs.29288 | hypothetical protein FLJ21865 | 7.19 | 4303 |
| 421124 | AI366452 | Hs.184430 | ESTs | 7.12 | 1483 |
| 428834 | AW899713 | Hs.339315 | ESTs | 7.09 | 2309 |
| 425247 | NM_005940 | Hs.155324 | matrix metalloproteinase 11 (stromelysin | 7.08 | 1943 5253 |
| 417696 | BE241624 | Hs.82401 | CD69 antigen (p60, early T-cell activati | 6.92 | 1113 |
| 409038 | T97490 | Hs.50002 | small inducible cytokine subfamily A (Cy | 6.87 | 326 |
| 456373 | BE247706 | Hs.89751 | membrane-spanning 4-domains, subfamily A | 6.85 | 4539 |
| 411962 | AA099050 | | gb: zk85d12.r1 Soares_pregnant_uterus_NbH | 6.85 | 594 |
| 418336 | BE179882 | | glutathione peroxidase 3 (plasma) | 6.85 | 1188 |
| 435010 | N89307 | Hs.124696 | oxidoreductase UCPA | 6.83 | 2887 |
| 442895 | AI814663 | Hs.170133 | forkhead box O1A (rhabdomyosarcoma) | 6.80 | 3478 |
| 418283 | S79895 | Hs.83942 | cathepsin K (pycnodysostosis) | 6.74 | 1175 5007 |
| 431493 | AI791493 | Hs.129873 | ESTs, novel cytochrome P450 | 6.73 | 2560 |
| 434096 | AW662958 | Hs.75825 | pleiomorphic adenoma gene-like 1 | 6.72 | 2815 |
| 452093 | AA447453 | Hs.27860 | Homo sapiens mRNA; cDNA DKFZp586M0723 (f | 6.62 | 4269 |
| 423366 | Z80345 | Hs.127610 | acyl-Coenzyme A dehydrogenase, C-2 to C- | 6.61 | 1739 5177 |
| 443679 | AK001810 | Hs.9670 | hypothetical protein FLJ10948 | 6.58 | 3538 5630 |
| 436293 | AI601188 | Hs.120910 | ESTs | 6.50 | 2976 |
| 423575 | C18863 | Hs.163443 | intron of periostin (OSF-2os) | 6.49 | 1759 |
| 411764 | T40064 | Hs.71968 | Homo sapiens mRNA; cDNA DKFZp564F053 (fr | 6.47 | 575 |
| 426488 | X03350 | Hs.4 | alcohol dehydrogenase 1B (class I), beta | 6.45 | 2071 5307 |
| 412088 | AI689496 | Hs.108932 | ESTs | 6.44 | 606 |
| 435088 | NM_000481 | Hs.102 | aminomethyltransferase (glycine cleavage | 6.37 | 2894 5561 |
| 408988 | AL119844 | Hs.49476 | Homo sapiens clone TUA8 Cri-du-chat regi | 6.35 | 320 |
| 430280 | AA361258 | Hs.237868 | interleukin 7 receptor | 6.28 | 2459 |
| 418310 | AA814100 | Hs.86693 | ESTs | 6.27 | 1180 |
| 452307 | R87866 | Hs.95120 | ESTs, Weakly similar to HZHU hemoglobin | 6.25 | 4294 |
| 406801 | AW242054 | Hs.190813 | ribosomal protein L9 | 6.25 | 101 |
| 456898 | NM_001928 | Hs.155597 | D component of complement (adipsin) | 6.23 | 4566 5803 |
| 410611 | AW954134 | Hs.20924 | KIAA1628 protein | 6.22 | 497 |
| 453510 | AI699482 | Hs.42151 | ESTs | 6.19 | 4415 |
| 450954 | AI904740 | Hs.25691 | receptor (calcitonin) activity modifying | 6.18 | 4178 |
| 407828 | AW959500 | Hs.49597 | retinoic acid induced 2 | 6.10 | 203 |
| 419047 | AW952771 | Hs.90043 | ESTs | 6.10 | 1269 |
| 414005 | AA134489 | | ESTs | 6.04 | 773 |
| 418318 | U47732 | Hs.84072 | transmembrane 4 superfamily member 3 | 6.01 | 1182 |
| 421893 | NM_001078 | Hs.109225 | vascular cell adhesion molecule 1 | 6.00 | 1577 5127 |
| 418994 | AA296520 | Hs.89546 | selectin E (endothelial adhesion molecul | 5.99 | 1266 |
| 413956 | AI821351 | Hs.193133 | ESTs, Weakly similar to ALU7_HUMAN ALU S | 5.95 | 770 |
| 416030 | H15261 | Hs.21948 | ESTs | 5.93 | 967 |
| 424580 | AA446539 | Hs.339024 | ESTs, Weakly similar to A46010 X-linked | 5.89 | 1860 |
| 429697 | AW296451 | Hs.24605 | ESTs | 5.88 | 2407 |
| 445457 | AF168793 | Hs.12743 | camitine O-octanoyltransferase | 5.86 | 3676 5655 |
| 437027 | AB023235 | Hs.5400 | KIAA1018 protein | 5.85 | 3030 5583 |
| 439569 | AW602166 | Hs.222399 | CEGP1 protein | 5.83 | 3217 |
| 423024 | AA593731 | Hs.325823 | ESTs, Moderately similar to ALU5_HUMAN A | 5.82 | 1713 |
| 438564 | AA381553 | Hs.198253 | major histocompatibility complex, class | 5.82 | 3149 |
| 427605 | NM_000997 | Hs.337445 | ribosomal protein L37 | 5.78 | 2171 5340 |
| 410023 | AB017169 | Hs.57929 | slit (Drosophila) homolog 3 | 5.77 | 431 4835 |
| 410016 | AA297977 | Hs.57907 | small inducible cytokine subfamily A (Cy | 5.68 | 429 |
| 418807 | NM_004944 | Hs.88646 | deoxyribonuclease I-like 3 | 5.63 | 1242 5030 |
| 436686 | AW450205 | Hs.305890 | BCL2-like 1 | 5.59 | 3004 |
| 411988 | AA455459 | Hs.164480 | ESTs, Weakly similar to T50609 hypotheti | 5.59 | 599 |
| 407891 | AA486620 | Hs.41135 | endomucin-2 | 5.57 | 212 |
| 418658 | AW874263 | Hs.32468 | ESTs | 5.57 | 1221 |
| 427007 | NM_006283 | Hs.173159 | transforming, acidic coiled-coil contain | 5.50 | 2121 5329 |
| 442441 | AI820662 | Hs.129598 | ESTs | 5.47 | 3430 |
| 439310 | AF086120 | Hs.102793 | ESTs | 5.47 | 3198 |
| 410066 | AL117664 | Hs.58419 | DKFZP586L2024 protein | 5.46 | 438 4836 |
| 448121 | AL045714 | Hs.128653 | hypothetical protein DKFZp564F013 | 5.45 | 3945 |
| 441499 | AW298235 | Hs.101689 | ESTs | 5.43 | 3354 |
| 459297 | BE300741 | Hs.125034 | hypothetical protein FLJ13340 | 5.41 | 4664 |
| 414807 | AI738616 | Hs.77348 | hydroxyprostaglandin dehydrogenase 15-(N | 5.40 | 879 |
| 409079 | W87707 | Hs.82065 | interleukin 6 signal transducer (gp130, | 5.39 | 332 |
| 408339 | R97502 | Hs.30443 | sentrin/SUMO-specific protease | 5.39 | 257 |
| 440538 | W76332 | Hs.79107 | mitogen-activated protein kinase 14 | 5.38 | 3296 |
| 414449 | AA557660 | Hs.76152 | decorin | 5.35 | 830 |
| 452165 | R17489 | Hs.28264 | Homo sapiens mRNA; cDNA DKFZp564L0822 (f | 5.32 | 4277 |
| 447073 | AW204821 | Hs.157726 | ESTs | 5.32 | 3818 |
| 409981 | AW516695 | Hs.8438 | ESTs | 5.29 | 425 |
| 415385 | R17798 | | intron of COBW-like protein (NM_018491) | 5.28 | 928 |
| 417788 | AI436699 | Hs.84928 | nuclear transcription factor Y, beta | 5.27 | 1124 |
| 455863 | AA907305 | Hs.36475 | ESTs | 5.27 | 4522 |
| 414522 | AW518944 | Hs.76325 | Immunoglobulin J chain | 5.25 | 840 |
| 457994 | AW136239 | Hs.132922 | ESTs, Weakly similar to TI47_HUMAN CARGO | 5.22 | 4605 |
| 422994 | AW891802 | Hs.296276 | ESTs | 5.22 | 1707 |
| 420570 | AI453665 | Hs.290870 | ESTs, Weakly similar to I38588 reverse t | 5.21 | 1434 |
| 431615 | AW295859 | Hs.235860 | ESTs | 5.21 | 2576 |
| 419055 | AI365384 | Hs.11571 | Homo sapiens cDNA FLJ11570 fis, clone HE | 5.18 | 1270 |
| 451820 | AW058357 | Hs.199248 | ESTs | 5.17 | 4251 |
| 422583 | AA410506 | Hs.27973 | KIAA0874 protein | 5.17 | 1660 |
| 421932 | W51778 | Hs.323949 | kangai 1 (suppression of tumorigenicity | 5.15 | 1581 |
| 425095 | AW014160 | Hs.182585 | KIAA1276 protein | 5.14 | 1920 |
| 419490 | NM_006144 | Hs.90708 | granzyme A (granzyme 1, cytotoxic T-lymp | 5.14 | 1319 5049 |
| 426406 | AI742501 | Hs.169756 | complement component 1, s subcomponent | 5.12 | 2062 |
| 418452 | BE379749 | Hs.85201 | C-type (calcium dependent, carbohydrate- | 5.11 | 1202 |
| 437773 | U24186 | Hs.283018 | replication protein A complex 34 kd subu | 5.10 | 3090 5592 |
| 439177 | AW820275 | Hs.76611 | ESTs, Weakly similar to I38022 hypotheti | 5.10 | 3189 |
| 441233 | AA972965 | | ESTs | 5.08 | 3339 |
| 428024 | Z29067 | Hs.2236 | NIMA (never in mitosis gene a)-related k | 5.06 | 2214 5350 |
| 416585 | X54162 | Hs.79386 | leiomodin 1, smooth muscle (LMOD1) (Thy | 5.03 | 1004 4964 |
| 459587 | AA031956 | | gb: zk15e04.s1 Soares_pregnant_uterus_NbH | 5.03 | 4673 |
| 410209 | AI583661 | Hs.60548 | hypothetical protein PRO1635 | 5.02 | 455 |
| 440874 | NM_003188 | Hs.7510 | mitogen-activated protein kinase kinase | 5.02 | 3319 5614 |
| 442070 | BE244622 | Hs.8084 | hypothetical protein dJ465N24.2.1 | 5.01 | 3394 |
| 408731 | R85652 | | Homo sapiens mRNA; cDNA DKFZp434F1928 (f | 5.00 | 298 |
| 420556 | AA278300 | Hs.124292 | Homo sapiens cDNA: FLJ23123 fis, clone L | 5.00 | 1432 |
| 413200 | AA127395 | Hs.222414 | ESTs | 4.99 | 700 |
| 448141 | AI471598 | | ESTs | 4.99 | 3948 |
| 414142 | AW368397 | Hs.334485 | hemicentin (fibulin 6) | 4.98 | 792 |
| 422241 | Y00062 | Hs.170121 | protein tyrosine phosphatase, receptor t | 4.98 | 1617 5142 |
| 452683 | AI089575 | | progesterone membrane binding protein | 4.98 | 4334 |
| 421998 | R74441 | | poly(A)-binding protein, nuclear 1 | 4.96 | 1591 |
| 451287 | AK002158 | Hs.26194 | likely homolog of mouse immunity-associa | 4.95 | 4207 5742 |
| 451240 | AJ131693 | Hs.58103 | A kinase (PRKA) anchor protein (yotiao) | 4.94 | 4202 5739 |
| 427620 | NM_003705 | Hs.179866 | solute carrier family 25 (mitochondrial | 4.93 | 2172 5341 |
| 443514 | BE464288 | Hs.141937 | ESTs | 4.92 | 3527 |
| 425498 | AL096725 | Hs.289010 | DKFZP434B103 protein | 4.89 | 1971 5267 |
| 447571 | AF274863 | Hs.18889 | DKFZP434M183 protein | 4.88 | 3880 5693 |
| 452040 | AW973242 | Hs.293690 | ESTs, Weakly similar to I38022 hypotheti | 4.88 | 4265 |
| 432606 | NM_002104 | Hs.3066 | granzyme K (serine protease, granzyme 3; | 4.88 | 2683 5509 |
| 422195 | AB007903 | Hs.113082 | KIAA0443 gene product | 4.87 | 1614 5141 |
| 450293 | N36754 | Hs.171118 | hypothetical protein FLJ00026 | 4.85 | 4125 |
| 446161 | AA628206 | Hs.14125 | p53 regulated PA26 nuclear protein | 4.83 | 3729 |
| 442804 | AW300118 | Hs.131257 | ESTs | 4.83 | 3472 |
| 414061 | NM_000699 | Hs.335493 | amylase, alpha 2A; pancreatic | 4.81 | 4912 782 |
| 426310 | NM_000909 | Hs.169266 | neuropeptide Y receptor Y1 | 4.80 | 2050 5298 |
| 420286 | AI796395 | Hs.111377 | ESTs | 4.80 | 1406 |
| 434025 | AF114264 | Hs.216381 | Homo sapiens clone HH409 unknown mRNA | 4.79 | 2806 5543 |
| 436648 | R18656 | | ESTs | 4.78 | 3000 |
| 449925 | AI342493 | Hs.24192 | Homo sapiens cDNA FLJ20767 fis, clone CO | 4.78 | 4091 |
| 435573 | AI580377 | Hs.34656 | ESTs | 4.77 | 2928 |
| 400419 | AF084545 | | Target | 4.77 | 17 4689 |
| 419086 | NM_000216 | Hs.89591 | Kallmann syndrome 1 sequence | 4.77 | 1274 5037 |
| 422867 | L32137 | Hs.1584 | cartilage oligomeric matrix protein (pse | 4.76 | 1687 5160 |
| 431704 | NM_006680 | Hs.2838 | malic enzyme 3, NADP()-dependent, mitoch | 4.75 | 2586 5487 |
| 452107 | AB020681 | Hs.27973 | KIAA0874 protein | 4.74 | 4271 5755 |
| 427544 | AI767152 | Hs.181400 | ESTs, Weakly similar to I78885 serine/th | 4.72 | 2163 |
| 453143 | AA382234 | | protein tyrosine phosphatase, receptor t | 4.71 | 4378 |
| 456676 | AI870001 | Hs.334479 | ESTs, Moderately similar to KIAA1139 pro | 4.71 | 4556 |
| 442295 | AI827248 | Hs.224398 | Homo sapiens cDNA FLJ11469 fis, clone HE | 4.70 | 3412 |
| 444483 | AV649942 | | gb: AV649942 GLC Homo sapiens cDNA clone | 4.69 | 3602 |
| 430234 | N29317 | | KIAA1238 protein | 4.69 | 2457 |
| 407183 | AA358015 | | gb: EST66864 Fetal lung III Homo sapiens | 4.68 | 134 |
| 438264 | T86773 | Hs.6133 | calpain 5 | 4.68 | 3128 |
| 446564 | AB037828 | Hs.15370 | KIAA1407 protein | 4.68 | 3762 5670 |
| 401274 | | | Target Exon | 4.68 | |
| 428804 | AK000713 | Hs.193736 | hypothetical protein FLJ20706 | 4.65 | 2301 5379 |
| 437952 | D63209 | Hs.5944 | solute carrier family 11 (proton-coupled | 4.65 | 3111 |
| 424896 | Z98520 | Hs.274370 | hypothetical protein FLJ20260 | 4.65 | 1896 |
| 422092 | AB007883 | Hs.111373 | KIAA0423 protein | 4.64 | 1601 5136 |
| 451871 | AI821005 | Hs.118599 | ESTs | 4.64 | 4255 |
| 414646 | AA353776 | Hs.901 | CD48 antigen (B-cell membrane protein) | 4.64 | 857 |
| 417640 | D30857 | Hs.82353 | protein C receptor, endothelial (EPCR) | 4.63 | 1109 |
| 434975 | AA657884 | Hs.314413 | ESTs | 4.63 | 2885 |
| 445263 | H57646 | Hs.42586 | KIAA1560 protein | 4.62 | 3664 |
| 417339 | AI912592 | Hs.7882 | ESTs | 4.62 | 1082 |
| 426992 | BE244961 | Hs.343200 | FE65-LIKE 2 | 4.60 | 2118 |
| 413489 | BE144228 | | gb: MR0-HT0165-140200-009-d04 HT0165 Homo | 4.60 | 727 |
| 447391 | AI377444 | Hs.54245 | ESTs, Weakly similar to S65824 reverse t | 4.60 | 3855 |
| 412802 | U41518 | Hs.74602 | aquaporin 1 (channel-forming integral pr | 4.60 | 4887 671 |
| 451529 | AI917901 | Hs.208641 | ESTs | 4.59 | 4226 |
| 443788 | AI732643 | Hs.144151 | downstream of breast cancer antigen NY-B | 4.57 | 3551 |
| 429698 | AI685086 | Hs.26339 | ESTs, Weakly similar to S21348 probable | 4.57 | 2408 |
| 430770 | AA765694 | Hs.123296 | ESTs | 4.57 | 2512 |
| 404517 | | | Target Exon | 4.56 | |
| 444301 | AK000136 | Hs.10760 | asporin (LRR class 1) | 4.55 | 3587 5637 |
| 459247 | N46243 | Hs.110373 | ESTs, Highly similar to T42626 secreted | 4.55 | 4662 |
| 407374 | AA724738 | Hs.131034 | ESTs, Weakly similar to I78885 serine/th | 4.55 | 157 |
| 446874 | AW968304 | Hs.56156 | ESTs | 4.55 | 3798 |
| 447894 | AW204253 | Hs.21912 | ESTs | 4.54 | 3919 |
| 437984 | AA781435 | Hs.334772 | hypothetical protein FLJ13614 | 4.54 | 3113 |
| 425106 | AA398972 | Hs.18987 | Homo sapiens BAC clone RP11-505D17 from | 4.54 | 1921 |
| 433735 | AA608955 | Hs.109653 | ESTs | 4.53 | 2784 |
| 438691 | AA906288 | | ESTs | 4.53 | 3156 |
| 409062 | AL157488 | Hs.50150 | Homo sapiens mRNA; cDNA DKFZp564B182 (fr | 4.52 | 329 |
| 426128 | NM_001471 | Hs.167017 | gamma-aminobutyric acid (GABA) B recepto | 4.52 | |
| 407136 | T64896 | Hs.287420 | Homo sapiens cDNA FLJ11533 fis, clone HE | 4.51 | 127 |
| 444331 | AW193342 | Hs.24144 | ESTs | 4.50 | 3590 |
| 444213 | T79623 | Hs.263351 | ESTs | 4.49 | 3584 |
| 412584 | X54870 | Hs.74085 | DNA segment on chromosome 12 (unique) 24 | 4.49 | 4881 649 |
| 411088 | BE247593 | Hs.145053 | ESTs | 4.49 | 533 |
| 414742 | AW370946 | Hs.23457 | ESTs | 4.48 | 872 |
| 441281 | BE501247 | Hs.144084 | ESTs | 4.47 | 3342 |
| 407939 | W05608 | Hs.312679 | ESTs, Weakly similar to A49019 dynein he | 4.47 | 217 |
| 421255 | BE326214 | Hs.93813 | ESTs | 4.45 | 1497 |
| 431725 | X65724 | Hs.2839 | Norrie disease (pseudoglioma) | 4.45 | 2591 5488 |
| 420311 | AW445044 | Hs.38207 | Human DNA sequence from clone RP4-530I15 | 4.44 | 1409 |
| 406687 | M31126 | | matrix metalloproteinase 11 (stromelysin | 4.44 | 4747 85 |
| 438150 | AA037534 | Hs.342874 | transforming growth factor, beta recepto | 4.41 | 3122 |
| 413902 | AU076743 | Hs.75613 | CD36 antigen (collagen type I receptor, | 4.40 | 762 |
| 434666 | AF151103 | Hs.112259 | T cell receptor gamma locus | 4.40 | 2859 5551 |
| 436169 | AA888311 | Hs.17602 | Homo sapiens cDNA FLJ12381 fis, clone MA | 4.39 | 2966 |
| 418007 | M13509 | Hs.83169 | matrix metalloproteinase 1 (interstitial | 4.39 | 1146 4998 |
| 452973 | H88409 | Hs.40527 | ESTs | 4.39 | 4362 |
| 459501 | AA854133 | Hs.310462 | ESTs | 4.39 | 4668 |
| 447109 | X69086 | Hs.286161 | Homo sapiens cDNA FLJ13613 fis, clone PL | 4.38 | 3822 5681 |
| 413869 | NM_000878 | Hs.75596 | interleukin 2 receptor, beta | 4.37 | 4908 760 |
| 440561 | AA471379 | Hs.7277 | peroxisomal biogenesis factor 3 | 4.36 | 3300 |
| 428957 | NM_003881 | Hs.194679 | WNT1 inducible signaling pathway protein | 4.35 | 2319 5384 |
| 420517 | AB011115 | Hs.98507 | KIAA0543 protein | 4.35 | 1425 5078 |
| 458627 | AW088642 | Hs.97984 | SRY (sex determining region Y)-box 17 (S | 4.35 | 4631 |
| 411779 | AA292811 | Hs.72050 | non-metastatic cells 5, protein expresse | 4.35 | 577 |
| 431474 | AL133990 | Hs.190642 | CEGP1 protein | 4.34 | 2559 |
| 416749 | AW068550 | Hs.79732 | fibulin 1 | 4.34 | 1020 |
| 418479 | AA829976 | | mannosidase, alpha, class 1A, member 2 | 4.34 | 1205 |
| 404262 | | | ENSP00000211196: DJ137F1.2 (novel member | 4.33 | |
| 426802 | AA385182 | Hs.46699 | ESTs | 4.33 | 2101 |
| 408735 | AI654450 | Hs.281706 | Homo sapiens mRNA; cDNA DKFZp564B176 (fr | 4.33 | 299 |
| 428232 | BE272452 | Hs.183109 | monoamine oxidase A | 4.32 | 2232 |
| 418307 | U70867 | Hs.83974 | solute carrier family 21 (prostaglandin | 4.31 | 1179 5008 |
| 422959 | AV647015 | | paired immunoglobulin-like receptor beta | 4.31 | 1699 |
| 423778 | Y09267 | Hs.132821 | flavin containing monooxygenase 2 | 4.31 | 1774 5187 |
| 402458 | | | C1002064: gi\|11993050\|gb\|AAG42574.1\|AF144 | 4.31 | |
| 431992 | NM_002742 | Hs.2891 | protein kinase C, mu | 4.31 | 2624 5499 |
| 415801 | R24219 | Hs.278443 | Fc fragment of IgG, low affinity Ilb, re | 4.31 | 955 |
| 422128 | AW881145 | | gb: QV0-OT0033-010400-182-a07 OT0033 Homo | 4.31 | 1607 |
| 433793 | AW975959 | Hs.107513 | ESTs, Moderately similar to KIAA1058 pro | 4.31 | 2788 |
| 438315 | R56795 | Hs.82419 | ESTs | 4.30 | 3132 |
| 434365 | AI073378 | Hs.126793 | ESTs | 4.30 | 2834 |
| 414033 | AL079707 | Hs.207443 | hypothetical protein MGC10848 | 4.30 | 775 |
| 410387 | AI277367 | Hs.47094 | ESTs | 4.30 | 472 |
| 421712 | AK000140 | Hs.107139 | hypothetical protein | 4.29 | 1556 |
| 424789 | BE176694 | Hs.279860 | tumor protein, translationally-controlle | 4.29 | 1886 |
| 420931 | AF044197 | Hs.100431 | small inducible cytokine B subfamily (Cy | 4.29 | 1465 5091 |
| 449203 | AI634578 | Hs.282121 | ESTs | 4.29 | 4044 |
| 429165 | AW009886 | Hs.118258 | prostate cancer associated protein 1 | 4.28 | 2335 |
| 403845 | | | NM_020666*: Homo sapiens protein serine t | 4.28 | 4717 49 |
| 412116 | AW402166 | Hs.784 | Epstein-Barr virus induced gene 2 (lymph | 4.28 | 608 |
| 444649 | AW207523 | | ESTs | 4.28 | 3616 |
| 412745 | AW994221 | | gb: RC3-BN0036-250200-012-d09 BN0036 Homo | 4.28 | 665 |
| 437644 | AA748575 | Hs.136748 | lectin-like NK cell receptor | 4.28 | 3077 |
| 417317 | AW296584 | Hs.293782 | ESTs | 4.27 | 1080 |
| 419169 | AW851980 | Hs.262346 | ESTs, Weakly similar to S72482 hypotheti | 4.27 | 1284 |
| 447742 | AF113925 | Hs.19405 | caspase recruitment domain 4 | 4.26 | 3899 5699 |
| 407758 | D50915 | Hs.38365 | KIAA0125 gene product | 4.26 | 192 4782 |
| 431955 | AL133606 | Hs.272244 | hypothetical protein FLJ11142 | 4.26 | 2620 5497 |
| 407307 | H73271 | | gb: yu04d05.r1 Soares fetal liver spleen | 4.25 | 150 |
| 452235 | AL039743 | Hs.28514 | testes development-related NYD-SP21 | 4.24 | 4285 |
| 408380 | AF123050 | Hs.44532 | diubiquitin | 4.24 | 262 4795 |
| 407826 | AA128423 | Hs.40300 | calpain 3, (p94) | 4.24 | 202 |
| 422431 | AI769410 | Hs.221461 | ESTs | 4.23 | 1646 |
| 433972 | AI878910 | Hs.278670 | cisplatin resistance-associated overexpr | 4.23 | 2802 |
| 454338 | AW381251 | | gb: RC0-HT0297-301099-011-a08 HT0297 Homo | 4.23 | 4477 |
| 424377 | AF081675 | Hs.146322 | killer cell lectin-like receptor subfami | 4.22 | 1836 5210 |
| 412220 | BE350058 | Hs.36787 | chromodomain helicase DNA binding protei | 4.22 | 619 |
| 407277 | AW170035 | Hs.326736 | Homo sapiens breast cancer antigen NY-BR | 4.21 | 148 |
| 421362 | AK000050 | Hs.103853 | hypothetical protein FLJ20043 | 4.21 | 1513 5103 |
| 415054 | AI733907 | | gb: zo86h09.y5 Stratagene ovarian cancer | 4.21 | 903 |
| 427326 | AI287878 | | gb: qv23f06.x1 NCI_CGAP_Lym6 Homo sapiens | 4.21 | 2143 |
| 447241 | BE382838 | Hs.19322 | Homo sapiens, Similar to RIKEN cDNA 2010 | 4.21 | 3833 |
| 416370 | N90470 | Hs.203697 | CD38 antigen (p45) | 4.19 | 990 |
| 417437 | U52682 | Hs.82132 | interferon regulatory factor 4 | 4.19 | 1095 4985 |
| 424243 | AI949359 | Hs.143600 | ESTs, Highly similar to cis Golgi-locali | 4.18 | 1818 |
| 437275 | AW976035 | Hs.292396 | ESTs, Weakly similar to A47582 B-cell gr | 4.17 | 3054 |
| 425367 | BE271188 | Hs.155975 | protein tyrosine phosphatase, receptor t | 4.17 | 1955 |
| 411878 | AW873296 | Hs.273742 | ESTs | 4.17 | 583 |
| 446170 | H49664 | Hs.125790 | leucine-rich repeat-containing 2 | 4.17 | 3732 |
| 451872 | AI821008 | Hs.10697 | ESTs | 4.17 | 4256 |
| 400143 | | | Eos Control | 4.16 | |
| 420914 | AA281697 | Hs.334827 | gb: zt03d10.r1 NCI_CGAP_GCB1 Homo sapiens | 4.16 | 1464 |
| 417054 | AF017060 | | aldehyde oxidase 1 | 4.15 | 1058 4977 |
| 423837 | AW937063 | Hs.275150 | gb: PM3-DT0037-231299-001-g11 DT0037 Homo | 4.15 | 1778 |
| 433855 | AA834082 | Hs.307559 | ESTs | 4.15 | 2792 |
| 420061 | AW024937 | Hs.29410 | ESTs | 4.15 | 1379 |
| 429490 | AI971131 | Hs.23889 | ESTs, Weakly similar to ALU7_HUMAN ALU S | 4.15 | 2377 |
| 422226 | AW517457 | Hs.42390 | nasopharyngeal carcinoma susceptibility | 4.14 | 1616 |
| 401586 | | | Target Exon | 4.13 | |
| 414152 | NM_003248 | Hs.75774 | thrombospondin 4 | 4.12 | 4914 793 |
| 419005 | T86358 | Hs.193931 | ESTs, Weakly similar to I54374 gene NF2 | 4.12 | 1267 |
| 410088 | AA738034 | | gb: nx15e08.s1 NCI_CGAR_GC3 Homo sapiens | 4.12 | 443 |
| 453876 | AW021748 | Hs.110406 | ESTs, Weakly similar to I38022 hypotheti | 4.12 | 4441 |
| 436283 | AI480319 | Hs.120058 | ESTs | 4.12 | 2974 |
| 439673 | T53169 | Hs.9587 | Homo sapiens cDNA: FLJ22290 fis, clone H | 4.12 | 3228 |
| 443622 | AI911527 | Hs.11805 | ESTs | 4.12 | 3533 |
| 448490 | AI523897 | Hs.271692 | ESTs, Weakly similar to I38022 hypotheti | 4.12 | 3976 |
| 417355 | D13168 | Hs.82002 | endothelin receptor type B | 4.11 | 1085 4981 |
| 408776 | AA057365 | | ESTs, Weakly similar to I38022 hypotheti | 4.11 | 306 |
| 408180 | N98311 | | gb: yy68e04.r1 Soares_multiple_sclerosis_{—} | 4.11 | 242 |
| 404917 | | | Target Exon | 4.11 | |
| 453216 | AL137566 | Hs.32405 | progesterone receptor (PR) | 4.10 | 4388 |
| 431708 | AI698136 | Hs.108873 | ESTs | 4.10 | 2588 |
| 420224 | M84371 | Hs.96023 | CD19 antigen | 4.10 | 1396 5068 |
| 426486 | BE178285 | Hs.170056 | Homo sapiens mRNA; cDNA DKFZp586B0220 (f | 4.10 | 2070 |
| 428594 | BE387236 | Hs.75415 | beta-2-microglobulin | 4.10 | 2275 |
| 424874 | AA347951 | | Homo sapiens cDNA FLJ20812 fis, clone AD | 4.09 | 1894 |

Pkey: Unique Eos probeset identifier number
ExAccn: Exemplar Accession number, Genbank accession number
UniGeneID: UniGene number
UniGene Title: UniGene gene title
R1: 90th percentile of breast tumor Als divided by the 90th percentile of breast metastases to the brain Als, where the 15th percentile of all normal body tissue Als was subtracted from the numerator and denominator.
SEQ ID NO(s): SEQ ID number(s) for nucleic acid and protein sequences associated with table entry.

[0347] TABLE 4B

| Pkey | CAT number | Accession |
|---|---|---|
| 431089 | 125941_2 | BG940189 AW063489 AA715980 BF001091 BF880066 AA666102 AA621946 AA491826 |
| 414496 | 1526_1 | AK058006 BF724822 W65303 AW887764 AW023806 Z25353 AW022095 AA730973 W00417 W73819 BF982096 AI927669 AW188021 |
| | | AW770478 AI913512 AA604358 AI697341 AI691028 AI338392 AI079403 H97538 AI144448 AI253102 AI051402 AI335900 AI868132 |
| | | N28900 H98465 AF268386 AI799915 AI819228 BE048413 AW304723 AI819923 BF223106 AA155907 AW298079 BF055272 BF446804 |
| | | BF197697 W58588 BF197538 AA032180 AA992597 AW590254 AA027824 AI129369 AI131331 AI655843 AA932907 AW104493 AI150615 |
| | | BF110226 AW172271 AI312659 AA057312 BE673669 AA722984 AW104985 AI129232 AI078648 AI653086 AI703481 AW515897 AI352206 |
| | | N67076 AW297281 AI686162 AA029184 AI610743 AW772016 AI091778 W65401 AI687374 AI218085 AI765158 AI018002 AI653068 |
| | | AI335704 AI520850 AW275228 AW275204 AI420247 AA975336 AI697042 AW182235 AA736386 AI281682 AW169698 AW263325 |
| | | BE645834 AI377438 AI146706 AA613808 AA716538 BI496247 AA032248 AI698930 AI193399 N70026 H86792 AA404489 W61267 |
| | | BF447230 AA910805 AA150774 AA621907 AA902526 AI827634 AW022037 BF059000 BI496246 BG577007 BG571077 AA460779 |
| | | AW816890 AW816893 AW816891 AA029183 AA010295 H86850 T83320 BE160823 H12925 N40087 AA096372 BE160847 AW816892 |
| | | AW816889 AW816882 AW816868 AW816941 AW816578 AW816940 AW816577 AI431628 AI828113 AA033677 AA033654 AA452704 |
| | | AA317582 AA346971 BF836584 H48669 BI861605 BG925200 AA463277 H89048 AA155952 W03252 W01510 W00915 W58589 AA164519 |
| | | N24017 N24622 N27149 N70109 R43771 AA010296 W84611 H98889 H88965 AW594424 AA034139 AA065223 N99696 BG981481 N94371 AI188071 AI370541 AI754442 |
| | | AA767970 W47146 N70977 H05510 W61268 T90796 AA164518 W47244 AA150883 AA034138 BF338483 F13671 H51317 W72716 N21488 |
| | | AA148524 AI749182 W95221 W92522 R20385 |
| 406800 | 0_0 | AA505535 |
| 411962 | 2307710_1 | AA099050 AA099526 T47733 |
| 418336 | 58817_1 | AW969583 BI772505 BE179578 AI493714 AI937718 AA663709 BI868925 AW138743 AI911314 BE645538 BG911947 AI380325 AI265803 |
| | | W56175 AI658779 AI675997 AW665991 AI459263 AI420121 Z38874 AA570115 AW301008 AA216257 BF062662 BI772789 H05989 |
| | | BF085523 BI001277 |
| 414005 | 259333_1 | AW968220 AA259126 AA287352 AA279767 AI479143 AA863044 AA134489 H49266 L32048 |
| 415385 | 285_10 | N92510 AW058040 AW027717 H26334 BG619539 BG426083 Z46181 F07399 R17798 AI861887 AA419558 AU185438 BE926285 |
| | | AA382353 |
| 441233 | 2645856_1 | AA972965 AI685347 AA923446 |
| 459587 | 93128_1 | BG545629 AA031999 AA031956 |
| 408731 | 11725_2 | AF305826 BE350971 AI765355 AW172600 AI310231 BM271766 AI547292 AW612019 AI674617 AW138666 AI147629 AI147620 BF857810 |
| | | BF886300 BF885952 BF886303 BF885956 BG565497 BE670834 AA114025 BF886396 BF886928 AV750861 D62864 |
| 448141 | 2047395_1 | AI660692 AI471598 H96927 |
| 452683 | 47038_2 | BG939450 AA775472 AW058592 BE855643 BF055005 AA864765 AI278037 AI655048 AI201557 AI687448 AI143618 BE500960 W58669 |
| | | AI659870 AI089575 AI668821 AA709020 AI978936 AI338511 AA600231 AI086687 AI090569 AI146299 BF221488 AI250850 AA663309 |
| | | AA744980 AA968965 AI088224 AI474516 AW057610 BE858855 AI624190 AI161307 AI247088 AA126444 AA126743 AI125007 AI433915 |
| | | AI708238 AA663513 AI370250 AA027291 AI763349 AA454524 AI708805 AA126568 AW089710 W58670 AI202620 BE835776 AW197418 |
| | | AA126821 AI961169 BG152992 F37518 BF907190 AI932429 AI421633 AI419518 W19340 BI818890 H89569 H89568 AA057704 BG028664 |
| | | BG741413 AW803665 AW889928 BF378811 BF088437 AA027290 BF093514 AW959502 AA456193 AA330467 R19974 R21000 AA362856 |
| | | W25522 |
| 421998 | 133592_1 | BI757233 BG911321 BF351759 AW244016 AW026834 AW024260 AI420138 AA779354 AI093360 AI934858 AW151292 AI373133 AI335587 |
| | | AI969728 AA101632 BE218525 AI802114 AI783721 AA845265 AW088826 AI832852 F03967 AI611148 AI720358 AW293764 N91161 |
| | | R79192 W85852 AW771263 BG820263 BG012864 R74441 R86080 W04256 BE707244 BF899452 BE327552 BE669500 AI492388 |
| | | AI241532 BF448184 AI209012 AA886528 N70309 AW582776 BF110563 BF448329 BE326537 AW770471 BF444926 BE674147 AI793266 AI991774 AI807726 AI218667 AA301750 |
| | | R44328 |
| 436648 | 52977_1 | AJ002788 AL118666 AI381600 BE672862 AW500520 BF223709 AW593740 AA262174 AA810597 AA810596 AA810595 F09382 BF976590 |
| | | AW968002 AA262288 BF931698 AW968014 R18656 BM459356 AW794189 BF954184 Z42558 BF891641 BF963380 Z45874 F05187 |
| | | X93079 BF742651 BF742649 R51324 D80031 BI457883 F06613 Z43128 F12243 BF950830 H19040 BF950829 F06439 R14947 F06702 |
| | | R61037 R52173 R14953 R12174 R13610 H10426 R11851 T65264 R18737 |
| 453143 | 10116_6 | BG542081 BF793365 AI371013 AI147536 AW005418 AA416767 AI083516 AI698032 AA410929 AI936116 AI079893 AA747741 BF940413 |
| | | BM007681 F12285 N75819 AI971415 AA032249 AW867908 AW867914 AI520867 BG990651 AA570507 AA036654 AA063585 AA873147 |
| | | AI538117 AA382234 T66232 BE272411 AA834031 BG122734 BI769788 W55850 AW879266 |
| 444483 | 389121_1 | AV649942 AV719783 AV650843 AV720464 |
| 430234 | 1746_1 | AW025803 AL137567 AI760919 BE552289 AW082686 AA913951 BE501313 AV756373 BE048863 AA828185 BG151502 AI655583 |
| | | AW473377 AI949888 AA453495 AW130287 AI222766 AI862122 AI309288 AL038626 AA714749 AI719007 W95486 N29317 AW589706 |
| | | AA905486 AI744057 AA759318 AI084950 AI273294 BF835579 AW235310 AI914478 BF887920 R21864 AI479541 AW189671 AW235752 |
| | | AI762157 BG698714 AA461269 AA460813 W95524 AA301369 AI760649 BF854009 AW303856 H42831 AV737305 H03702 R22396 R65961 |
| 413489 | 1517623_1 | BE144228 BE144291 |
| 438691 | 2575806_1 | AA829941 AA906288 AI914939 AA814353 |
| 406687 | 0_0 | M31126 |
| 418479 | 175360_1 | BF966791 BG564455 BE672212 AI151416 AI566231 AI417585 AI378391 AA236264 AI337574 AI346166 AA406590 AA748618 AW771957 |
| | | AA478626 AW338072 AI889444 AI810315 BE503662 BG231886 AI888230 AI289102 BF594638 AW074094 AW512456 AA832229 |
| | | AI056108 AI025868 AI245806 D61957 AI093841 AI721013 AI597594 AA993022 AI128620 AI285106 W37459 W35410 N90037 AA890323 |
| | | R39943 AI468741 AA829976 AA479201 AI539018 AA875875 AA448827 AW779493 Z39056 H84925 AA223923 AW517592 AI804400 |
| | | AA911882 BM353143 D62885 AI457883 AI880626 R31694 R42772 R68804 R44147 R71463 AV742540 BF966987 |
| 422959 | MH905_3 | AJ400845 AI954159 AL041618 AI028269 AA769325 AW780241 AW129462 AI271476 BF798303 AA836991 AW273346 AI436321 AI375545 |
| | | AL040967 AA889495 AI922524 AA598667 AA423804 AL040910 N80292 AI954063 AI923968 AI400578 AA748499 BE677845 AW020788 |
| | | AA860230 AW519209 AA767391 AI860419 AA476935 AW452389 AI017695 AA806940 BI497005 AI051533 AI650706 AI811516 AA609569 |
| | | AI439198 BF430946 AA749268 AI624860 AI784422 BI491753 AI206880 BE671796 AI431957 AI187038 AI678429 AI273421 AA897667 |
| | | AA586499 BE241923 AF161081 NM_013440 BE073169 AI700673 AV699081 AV684786 AV688081 AV689220 AV689216 AA132636 |
| | | BF086186 BF917106 AV762653 BI064033 BE168145 AA778650 AI984255 W69468 AA132452 N53166 AI949278 AW168519 F28686 |
| | | AA908333 F37181 BI002729 |
| 422128 | 17516_16 | BI261864 BI036453 BI023096 BI023388 AA331991 AV721898 AW881145 AA490718 M85637 T06067 AV761102 BI023091 BI022906 |
| 444649 | 630074_1 | AI184631 AW138226 AI917315 AI825123 AI651395 AI636782 AI990399 AW207523 |
| 412745 | 1246023_1 | AW994221 AW994211 BE075786 AW994378 |
| 407307 | 1984287_1 | H73271 R96266 H73959 R96214 |
| 454338 | 788429_−2 | AW381251 |
| 415054 | 3070732_1 | AI732614 AA159708 AI733907 |
| 427326 | 565_21 | Y10529 BF062364 BE501015 AA758739 AF359418 AF359419 BM021254 AF359416 BI087915 BG995764 BF345274 BG431056 AI804160 |
| | | AI287878 AA400787 |
| 400143 | 11259_1 | BC004324 NM_001020 BC007977 M60854 BM050628 BG829809 BE385504 BG744451 BI826914 BE440007 BI260656 BE395117 |
| | | BE389334 BE255792 BI194169 BI668218 BI194376 BG716213 BG714408 BE392513 AV722219 AW328077 BM424171 BI828267 |
| | | AW958606 BG831252 BE392943 BE394033 BI858915 BI668334 BE621019 BG706995 BE791985 BF967484 BI193635 BG761859 |
| | | BM466537 BG747165 BG827488 AI133550 BM011511 BI227282 BG489212 BG478388 BE727789 BI160880 BG831707 BG324692 |
| | | BM470427 BI083889 BG831605 BG754114 BG420536 BF308210 BE384213 BG832271 BG828032 BG481641 BF205675 BE899041 |
| | | BE271558 BI193807 BI159866 BG473786 BG397178 BI194428 BI117210 BG768326 BG759507 BF975645 BF343657 BM020598 |
| | | BG831082 BG829943 BG829501 BF306557 BE562511 BM050145 BM017978 BI193934 BI160764 BI160371 BG754991 BF973348 |
| | | BF663234 BF032537 BE388168 BM009051 BI192794 BG831002 BG830459 BG764737 BG761808 BG481705 BG104314 BM464565 |
| | | BI261500 BG831857 BG831684 BG829852 BG765030 BG760419 BG760268 BG749762 BG480900 BG419627 BG248771 BF975542 |
| | | BM042233 BI161149 BG831302 BG830033 BG829626 BM050064 BI193014 BI161360 BG822729 BG110091 BG106500 BI258369 |
| | | BG831982 BM458301 BM019513 BI161350 BI114178 BG481969 BG474870 BF974048 BF971122 BE741405 BE395269 BG832027 |
| | | BG831469 BG490895 BM413638 BG943529 BG831012 BG829471 BG686284 BG337575 BG336551 BF206677 BI258301 BI160946 |
| | | BG105893 BF183072 BM459542 BI193881 BG832043 BG831323 BI194545 BI160968 BG755930 BG706018 BE743865 BM465145 |
| | | BG831227 BG774290 BF683451 BE907161 BM045391 BI194396 BI161269 BG747091 BG546643 BF984863 BI160206 BI226402 BI226336 |
| | | AW328236 BG339458 BF972634 BE909808 BI160988 BI160251 BG828764 BG826860 BG758360 BF568228 BI818282 BI457127 |
| | | BG831491 BG759864 AI830010 BF568381 BE907238 BI161172 BI116773 BG827153 BG825088 BG335419 BG109404 AI929068 |
| | | BE906354 BE408564 BM045000 BG339617 BG282794 BG335767 BE907263 BF568921 BG829961 BG479305 BG260397 AI922228 |
| | | BE301975 AW516055 BG480919 BG480626 AW196817 BG336261 BE906157 BE395717 BE391427 BI192954 BG829757 BG476379 |
| | | BE301536 BE394727 BE257695 BE905344 AI433577 BE894416 BE886992 BE409223 BF034756 BE904077 BG830886 BE909153 |
| | | BE907998 BE395767 AI871751 BE744523 BI192663 BG831669 AI000225 BE743836 BE272515 AA628078 BM463802 BE393375 |
| | | BE393033 AW170187 BE730961 BE395410 BE744572 BE392297 BE391448 BE390780 BE388821 BE258477 BE905970 BE901567 |
| | | BE898833 BE880326 BF726889 BE910504 BE390753 BE390131 AA650542 BE744156 BE394125 BE742207 BE395265 BE392942 |
| | | BE894336 BE378222 BE906926 BE904650 BE393704 BE620999 BE515162 BE378753 BE272370 BE907458 BE612801 BE392484 |
| | | BE907636 BE907353 BE910491 BE909796 BE905331 AW248173 AI683576 BE908826 BE620180 BF037570 BE908312 BE615015 |
| | | BE256977 BE746875 BE394133 BE391478 BE910068 BE907185 BE742109 AA995746 BE561195 BE908825 BE906472 BE906509 |
| | | BE906017 BE910442 BE514657 BI261969 BE741707 BE392216 BM042793 BF570283 BI262119 BE395707 BE378298 AW327827 |
| | | BE394422 BF569178 BE263240 AI700512 BG830290 BF569308 BF569156 BI194587 BE390831 BG745096 AI681675 BE395674 AA136372 |
| | | BE279892 AA442822 BE384898 AA313519 AI878866 AA305904 F33366 BE394852 F29153 F33618 AI133637 AA300009 F34063 F29455 |
| | | AU099691 AI905085 AI906656 AA343249 BE388691 AW404280 AA379888 F29022 BF089981 F31013 F24305 |
| 417054 | 12405_2 | BG533564 BG618564 AW296119 AI269233 BF508328 AW364777 AW292258 AA371049 AI452471 AI092522 BG618376 AL049080 |
| | | AA631068 BG564643 T53833 AV702544 BG533452 AV05004 AA588281 T28665 BG569026 AV646874 AV647253 AV647455 AV647749 |
| | | BI759444 AV652457 AV695354 AV696010 AV697248 BG617586 AV722549 AI435836 AI590676 AI245019 AW338243 AA530898 D52191 |
| | | AI435352 D57473 BG566952 AI420505 AA035245 AV704972 BG564113 AI439237 AI287456 AV695686 AA349017 |
| 410088 | 1241437_1 | AW977844 AA738034 AA081561 |
| 408776 | 106302_1 | BF057799 BE218747 T15720 AA057365 AI811370 |
| 408180 | 640212_1 | N98311 BE160207 AW168088 |
| 424874 | 11607_6 | AI688463 BF959633 BF897027 AA883123 |

Pkey: Unique Eos probeset identifier number
CAT number: Gene cluster number
Accession: Genbank accession numbers

[0348] TABLE 4C

| Pkey | Ref | Strand | Nt_position |
|---|---|---|---|
| 406387 | 9256180 | Plus | 116229-116371, 117512-117651 |
| 401274 | 8954206 | Minus | 111258-111378 |
| 404517 | 8151983 | Minus | 92340-92443 |
| 404262 | 9367893 | Minus | 69642-69807, 70646-70812 |
| 402458 | 9796782 | Plus | 170479-171134 |
| 403845 | 9959258 | Minus | 87151-87288, 87539-87633, |
| | | | 88216-88382, 8847 |
| 401586 | 9838242 | Minus | 93974-94099 |
| 404917 | 7341851 | Plus | 49330-49498 |

Pkey: Unique number corresponding to an Eos probeset
Ref: Sequence source. The 7 digit numbers in this column are Genbank Identifier (GI) numbers. “Dunham I. et al.” refers to the publication entitled “The DNA sequence of human chromosome 22.” Dunham I. et al., Nature (1999) 402: 489-495.
Strand: Indicates DNA strand from which exons were predicted.
Nt_position: Indicates nucleotide positions of predicted exons.

[0349] TABLE 5A
About 489 genes downregulated in breast metastases to the brain relative to normal breast tissue

| Pkey | ExAccn | UniGeneID | UniGene Title | R1 | SEQ ID NO(s): |
|---|---|---|---|---|---|
| 418026 | BE379727 | Hs.83213 | fatty acid binding protein 4, adipocyte | 94.34 | 1148 |
| 447205 | BE617015 | Hs.11006 | ESTs, Moderately similar to T17372 plasm | 75.45 | 3829 |
| 420202 | AL036557 | Hs.95910 | putative lymphocyte G0/G1 switch gene | 51.29 | 1394 |
| 416950 | AL049798 | Hs.80552 | dermatopontin | 41.57 | 1042 4972 |
| 410677 | NM_003278 | Hs.65424 | tetranectin (plasminogen-binding protein | 40.07 | 4852 504 |
| 441591 | AF055992 | Hs.183 | Duffy blood group | 39.13 | 3358 5617 |
| 453655 | AW960427 | Hs.342874 | transforming growth factor, beta recepto | 35.85 | 4421 |
| 426488 | X03350 | Hs.4 | alcohol dehydrogenase 1B (class I), beta | 31.80 | 2071 5307 |
| 443932 | AW888222 | Hs.9973 | tensin | 31.62 | 3563 |
| 447990 | BE048821 | Hs.20144 | small inducible cytokine subfamily A (Cy | 31.16 | 3933 |
| 454059 | NM_003154 | Hs.37048 | statherin | 30.14 | 4466 5793 |
| 415274 | AF001548 | Hs.78344 | myosin, heavy polypeptide 11, smooth mus | 30.07 | 4944 921 |
| 416931 | D45371 | Hs.80485 | adipose most abundant gene transcript 1 | 29.91 | 1039 4970 |
| 442321 | AF207664 | Hs.8230 | a disintegrin-like and metalloprotease ( | 29.18 | 3416 5619 |
| 414541 | BE293116 | Hs.76392 | aldehyde dehydrogenase 1 family, member | 28.50 | 842 |
| 424206 | NM_003734 | Hs.198241 | amine oxidase, copper containing 3 (vasc | 28.07 | 1815 5203 |
| 421998 | R74441 | | poly(A)-binding protein, nuclear 1 | 27.35 | 1591 |
| 428232 | BE272452 | Hs.183109 | monoamine oxidase A | 27.07 | 2232 |
| 410635 | D58863 | Hs.347963 | chorionic somatomammotropin hormone 1 (p | 26.61 | 500 |
| 418058 | AW161552 | Hs.83381 | guanine nucleotide binding protein 11 | 25.80 | 1154 |
| 416157 | NM_003243 | Hs.342874 | transforming growth factor, beta recepto | 25.08 | 4956 977 |
| 443514 | BE464288 | Hs.141937 | ESTs | 24.80 | 3527 |
| 411939 | AI365585 | Hs.146246 | ESTs | 24.50 | 587 |
| 445263 | H57646 | Hs.42586 | KIAA1560 protein | 23.85 | 3664 |
| 422287 | F16365 | Hs.114346 | cytochrome c oxidase subunit VIIa polype | 23.37 | 1628 |
| 412810 | M21574 | Hs.74615 | platelet-derived growth factor receptor, | 21.92 | 4888 672 |
| 428398 | AI249368 | Hs.98558 | ESTs | 21.53 | 2249 |
| 421296 | NM_002666 | Hs.103253 | perilipin | 21.52 | 1504 5100 |
| 417365 | D50683 | Hs.82028 | transforming growth factor, beta recepto | 21.33 | 1086 4982 |
| 407694 | U77594 | Hs.37682 | retinoic acid receptor responder (tazaro | 20.91 | 181 4779 |
| 412047 | AA934589 | Hs.49696 | ESTs | 20.20 | 605 |
| 411962 | AA099050 | | gb: zk85d12.r1 Soares_pregnant_uterus_NbH | 20.05 | 594 |
| 452426 | AI904823 | Hs.31297 | duodenal cytochrome b | 20.04 | 4306 |
| 422550 | BE297626 | Hs.296049 | microfibrillar-associated protein 4 | 19.29 | 1655 |
| 435684 | NM_001290 | Hs.4980 | LIM domain binding 2 | 19.08 | 2937 5568 |
| 414496 | W73853 | | ESTs | 18.40 | 837 |
| 456898 | NM_001928 | Hs.155597 | D component of complement (adipsin) | 18.38 | 4566 5803 |
| 412442 | AI983730 | Hs.26530 | serum deprivation response (phosphatidyl | 18.35 | 631 |
| 423024 | AA593731 | Hs.325823 | ESTs, Moderately similar to ALU5_HUMAN A | 18.03 | 1713 |
| 407744 | AB020629 | Hs.38095 | ATP-binding cassette, sub-family A (ABC1 | 17.87 | 187 4781 |
| 430310 | U60115 | Hs.239069 | four and a half LIM domains 1 | 17.77 | 2468 5443 |
| 446808 | AA703226 | Hs.16193 | Homo sapiens mRNA; cDNA DKFZp586B211 (fr | 17.70 | 3790 |
| 428848 | NM_000230 | Hs.194236 | leptin (murine obesity homolog) | 17.24 | 2312 5381 |
| 413624 | BE177019 | Hs.75445 | SPARC-like 1 (mast9, hevin) | 16.55 | 741 |
| 453355 | AW295374 | Hs.31412 | myopodin | 16.33 | 4400 |
| 453767 | AB011792 | Hs.35094 | extracellular matrix protein 2, female o | 16.15 | 4430 5782 |
| 423778 | Y09267 | Hs.132821 | flavin containing monooxygenase 2 | 16.03 | 1774 5187 |
| 410023 | AB017169 | Hs.57929 | slit (Drosophila) homolog 3 | 15.92 | 431 4835 |
| 443060 | D78874 | Hs.8944 | procollagen C-endopeptidase enhancer 2 | 15.91 | 3492 |
| 435088 | NM_000481 | Hs.102 | aminomethyltransferase (glycine cleavage | 15.75 | 2894 5561 |
| 429350 | AI754634 | Hs.131987 | ESTs | 15.72 | 2358 |
| 416585 | X54162 | Hs.79386 | leiomodin 1, smooth muscle (LMOD1) (Thy | 15.28 | 1004 4964 |
| 446141 | AW631255 | Hs.324470 | L-3-hydroxyacyl-Coenzyme A dehydrogenase | 15.16 | 3726 |
| 453676 | AW853745 | Hs.286035 | hypothetical protein FLJ22686 | 15.13 | 4423 |
| 442895 | AI814663 | Hs.170133 | forkhead box O1A (rhabdomyosarcoma) | 15.02 | 3478 |
| 443679 | AK001810 | Hs.9670 | hypothetical protein FLJ10948 | 15.01 | 3538 5630 |
| 425809 | AA370362 | Hs.57958 | EGF-TM7-latrophilin-related protein | 15.00 | 1997 |
| 427373 | AB007972 | Hs.130760 | myosin phosphatase, target subunit 2 | 14.95 | 2149 |
| 407102 | AA007629 | | glycerol-3-phosphate dehydrogenase 1 (so | 14.94 | 123 |
| 451533 | NM_004657 | Hs.26530 | serum deprivation response (phosphatidyl | 14.94 | 4227 5745 |
| 420105 | AW015571 | Hs.32244 | ESTs, Weakly similar to FMOD_HUMAN FIBRO | 14.77 | 1385 |
| 447371 | AA334274 | Hs.18368 | DKFZP564B0769 protein | 14.74 | 3851 |
| 414290 | AI568801 | Hs.71721 | ESTs | 14.51 | 808 |
| 424098 | AF077374 | Hs.139322 | small proline-rich protein 3 | 14.45 | 1804 5199 |
| 413902 | AU076743 | Hs.75613 | CD36 antigen (collagen type I receptor, | 14.33 | 762 |
| 417852 | AJ250562 | Hs.82749 | transmembrane 4 superfamily member 2 | 14.30 | 1130 4994 |
| 431971 | BE274907 | Hs.77385 | myosin, light polypeptide 6, alkali, smo | 13.84 | 2622 |
| 427007 | NM_006283 | Hs.173159 | transforming, acidic coiled-coil contain | 13.83 | 2121 5329 |
| 420255 | NM_007289 | Hs.1298 | membrane metallo-endopeptidase (neutral | 13.76 | 1400 5070 |
| 447225 | R62676 | Hs.17820 | Rho-associated, coiled-coil containing p | 13.75 | 3831 |
| 448429 | D17408 | Hs.21223 | calponin 1, basic, smooth muscle | 13.66 | 3969 5709 |
| 452123 | AI267615 | Hs.38022 | ESTs | 13.20 | 4273 |
| 414033 | AL079707 | Hs.207443 | hypothetical protein MGC10848 | 13.12 | 775 |
| 444933 | NM_016245 | Hs.12150 | retinal short-chain dehydrogenase/reduct | 13.07 | 3641 5648 |
| 454229 | AW957744 | Hs.278469 | lacrimal proline rich protein | 12.83 | 4473 |
| 425280 | U31519 | Hs.1872 | phosphoenolpyruvate carboxykinase 1 (sol | 12.72 | 1947 5254 |
| 422195 | AB007903 | Hs.113082 | KIAA0443 gene product | 12.58 | 1614 5141 |
| 403593 | | | Target Exon | 12.52 | |
| 409882 | AJ243191 | Hs.56874 | heat shock 27 kD protein family, member 7 | 12.22 | 412 4833 |
| 437275 | AW976035 | Hs.292396 | ESTs, Weakly similar to A47582 B-cell gr | 12.03 | 3054 |
| 406800 | AA505535 | | gb: nh84h10.s1 NCI_CGAP_Br1.1 Homo sapien | 11.99 | 100 |
| 450239 | BE541781 | Hs.24697 | cytidine monophosphate-N-acetylneuramini | 11.86 | 4116 |
| 422087 | X58968 | Hs.111301 | matrix metalloproteinase 2 (gelatinase A | 11.80 | 1600 |
| 435010 | N89307 | Hs.124696 | oxidoreductase UCPA | 11.80 | 2887 |
| 453874 | AW591783 | Hs.36131 | collagen, type XIV, alpha 1 (undulin) | 11.72 | 4440 |
| 412295 | AW088826 | | poly(A)-binding protein, nuclear 1 | 11.67 | 622 |
| 427980 | AA418305 | Hs.303205 | EST | 11.65 | 2209 |
| 441499 | AW298235 | Hs.101689 | ESTs | 11.60 | 3354 |
| 446500 | U78093 | Hs.15154 | sushi-repeat-containing protein, X chrom | 11.49 | 3756 5668 |
| 453299 | W44626 | Hs.30627 | ESTs | 11.48 | 4392 |
| 419271 | N34901 | Hs.238532 | ESTs | 11.40 | 1296 |
| 416729 | U46165 | Hs.1027 | Ras-related associated with diabetes | 11.39 | 1016 4967 |
| 407570 | Z19002 | Hs.37096 | zinc finger protein 145 (Kruppel-like, e | 11.37 | 169 4775 |
| 426928 | AF037062 | Hs.172914 | retinol dehydrogenase 5 (11-cis and 9-ci | 11.35 | 2113 5327 |
| 433633 | AI880516 | Hs.84630 | ESTs, Weakly similar to 2004399A chromos | 11.33 | 2775 |
| 452669 | AA216363 | Hs.262958 | hypothetical protein DKFZp434B044 | 11.33 | 4332 |
| 413956 | AI821351 | Hs.193133 | ESTs, Weakly similar to ALU7_HUMAN ALU S | 11.29 | 770 |
| 407099 | M94891 | Hs.173609 | pregnancy specific beta-1-glycoprotein 4 | 11.28 | 121 4764 |
| 415447 | Z97171 | Hs.78454 | myocilin, trabecular meshwork inducible | 11.09 | 4947 932 |
| 451287 | AK002158 | Hs.26194 | likely homolog of mouse immunity-associa | 11.03 | 4207 5742 |
| 442561 | NM_013450 | Hs.8383 | bromodomain adjacent to zinc finger doma | 11.03 | 3442 5621 |
| 409981 | AW516695 | Hs.8438 | ESTs | 10.93 | 425 |
| 453180 | N46243 | Hs.110373 | ESTs, Highly similar to T42626 secreted | 10.88 | 4383 |
| 407891 | AA486620 | Hs.41135 | endomucin-2 | 10.87 | 212 |
| 406801 | AW242054 | Hs.190813 | ribosomal protein L9 | 10.81 | 101 |
| 410545 | U32324 | Hs.64310 | interleukin 11 receptor, alpha | 10.79 | 4850 490 |
| 442498 | U54617 | Hs.8364 | Homo sapiens pyruvate dehydrogenase kina | 10.76 | 3435 5620 |
| 425095 | AW014160 | Hs.182585 | KIAA1276 protein | 10.67 | 1920 |
| 449101 | AA205847 | Hs.23016 | G protein-coupled receptor | 10.48 | 4035 |
| 415550 | L13720 | Hs.78501 | growth arrest-specific 6 | 10.41 | 4949 936 |
| 444562 | AA186715 | Hs.336429 | RIKEN cDNA 9130422N19 gene | 10.40 | 3607 |
| 428043 | T92248 | Hs.2240 | uteroglobin | 10.36 | 2216 |
| 447261 | NM_006691 | Hs.17917 | extracellular link domain-containing 1 | 10.33 | 3836 5685 |
| 410209 | AI583661 | Hs.60548 | hypothetical protein PRO1635 | 10.29 | 455 |
| 425078 | NM_002599 | Hs.154437 | phosphodiesterase 2A, cGMP-stimulated | 10.28 | 1917 5245 |
| 444769 | AI191650 | Hs.221436 | ESTs | 10.26 | 3626 |
| 447726 | AL137638 | Hs.19368 | matrilin 2 | 10.23 | 3896 5697 |
| 420225 | AW243046 | Hs.282076 | Homo sapiens mRNA for KIAA1650 protein, | 10.17 | 1397 |
| 411988 | AA455459 | Hs.164480 | ESTs, Weakly similar to T50609 hypotheti | 10.17 | 599 |
| 425887 | AL049443 | Hs.161283 | Homo sapiens mRNA; cDNA DKFZp586N2020 (f | 10.15 | 2010 |
| 456063 | NM_006744 | Hs.76461 | retinol-binding protein 4, interstitial | 10.03 | 4528 5797 |
| 458627 | AW088642 | Hs.97984 | SRY (sex determining region Y)-box 17 (S | 10.00 | 4631 |
| 428412 | AA428240 | Hs.126083 | ESTs | 9.97 | 2252 |
| 410016 | AA297977 | Hs.57907 | small inducible cytokine subfamily A (Cy | 9.90 | 429 |
| 414449 | AA557660 | Hs.76152 | decorin | 9.88 | 830 |
| 447299 | AF043897 | Hs.18075 | chromosome 9 open reading frame 3 | 9.82 | 3840 |
| 421823 | N40850 | Hs.28625 | ESTs | 9.78 | 1568 |
| 421218 | NM_000499 | Hs.72912 | cytochrome P450, subfamily I (aromatic c | 9.72 | 1490 5098 |
| 419119 | AA583543 | Hs.32135 | ESTs | 9.70 | 1278 |
| 457056 | NM_005534 | Hs.177559 | interferon gamma receptor 2 (interferon | 9.65 | 4576 5809 |
| 423366 | Z80345 | Hs.127610 | acyl-Coenzyme A dehydrogenase, C-2 to C- | 9.63 | 1739 5177 |
| 417511 | AL049176 | Hs.82223 | chordin-like | 9.60 | 1098 4987 |
| 427523 | BE242779 | Hs.179526 | upregulated by 1,25-dihydroxyvitamin D-3 | 9.51 | 2160 |
| 434975 | AA657884 | Hs.314413 | ESTs | 9.49 | 2885 |
| 452816 | AA131789 | Hs.61509 | ESTs | 9.47 | 4346 |
| 443793 | AA045290 | Hs.25930 | ESTs, Weakly similar to 2109260A B cell | 9.47 | 3554 |
| 441281 | BE501247 | Hs.144084 | ESTs | 9.44 | 3342 |
| 408503 | AW119059 | | ESTs, Weakly similar to T12552 hypotheti | 9.40 | 273 |
| 412000 | AW576555 | Hs.15780 | ATP-binding cassette, sub-family A (ABC1 | 9.38 | 600 |
| 452307 | R87866 | Hs.95120 | ESTs, Weakly similar to HZHU hemoglobin | 9.36 | 4294 |
| 404246 | | | Target Exon | 9.33 | |
| 436394 | AA531187 | Hs.126705 | ESTs | 9.28 | 2982 |
| 431048 | R50253 | Hs.249129 | cell death-inducing DFFA-like effector a | 9.21 | 2526 |
| 437176 | AW176909 | Hs.42346 | calcineurin-binding protein calsarcin-1 | 9.18 | 3042 |
| 444567 | AV654020 | | ESTs, Weakly similar to T26686 hypotheti | 9.18 | 3609 |
| 448274 | AI268097 | Hs.67317 | Homo sapiens cDNA FLJ11775 fis, clone HE | 9.17 | 3954 |
| 428769 | AW207175 | Hs.106771 | ESTs | 9.15 | 2293 |
| 449925 | AI342493 | Hs.24192 | Homo sapiens cDNA FLJ20767 fis, clone CO | 9.11 | 4091 |
| 425498 | AL096725 | Hs.289010 | DKFZP434B103 protein | 9.10 | 1971 5267 |
| 438150 | AA037534 | Hs.342874 | transforming growth factor, beta recepto | 9.06 | 3122 |
| 420174 | AI824144 | Hs.199749 | ESTs | 9.02 | 1391 |
| 410066 | AL117664 | Hs.58419 | DKFZP586L2024 protein | 8.98 | 438 4836 |
| 428024 | Z29067 | Hs.2236 | NIMA (never in mitosis gene a)-related k | 8.96 | 2214 5350 |
| 419407 | AW410377 | Hs.41502 | hypothetical protein FLJ21276 | 8.92 | 1311 |
| 453876 | AW021748 | Hs.110406 | ESTs, Weakly similar to I38022 hypotheti | 8.90 | 4441 |
| 445107 | AI208121 | Hs.147313 | ESTs, Weakly similar to I38022 hypotheti | 8.86 | 3653 |
| 434096 | AW662958 | Hs.75825 | pleiomorphic adenoma gene-like 1 | 8.86 | 2815 |
| 407815 | AW373860 | Hs.183860 | hypothetical protein FLJ20277 | 8.76 | 201 |
| 412649 | NM_002206 | Hs.74369 | integrin, alpha 7 | 8.73 | 4884 654 |
| 424651 | AI493206 | Hs.32425 | ESTs | 8.68 | 1868 |
| 442560 | AA365042 | Hs.325531 | ESTs, Weakly similar to 2004399A chromos | 8.65 | 3441 |
| 407826 | AA128423 | Hs.40300 | calpain 3, (p94) | 8.63 | 202 |
| 442870 | N45018 | Hs.8769 | hypothetical protein DKFZp761J17121 | 8.58 | 3476 |
| 443062 | N77999 | Hs.8963 | Homo sapiens mRNA full length insert cDN | 8.57 | 3493 |
| 413856 | D13639 | Hs.75586 | cyclin D2 | 8.53 | 4907 758 |
| 422060 | R20893 | Hs.325823 | ESTs, Moderately similar to ALU5_HUMAN A | 8.51 | 1596 |
| 442572 | AI001922 | Hs.135121 | hypothetical protein FLJ22415 | 8.46 | 3445 |
| 430468 | NM_004673 | Hs.241519 | angiopoietin-like 1 | 8.42 | 2489 5452 |
| 417640 | D30857 | Hs.82353 | protein C receptor, endothelial (EPCR) | 8.38 | 1109 |
| 452165 | R17489 | Hs.28264 | Homo sapiens mRNA; cDNA DKFZp564L0822 (f | 8.36 | 4277 |
| 414061 | NM_000699 | Hs.335493 | amylase, alpha 2A; pancreatic | 8.34 | 4912 782 |
| 420139 | NM_005357 | Hs.95351 | lipase, hormone-sensitive | 8.34 | 1388 5065 |
| 418185 | AW958272 | Hs.347326 | intercellular adhesion molecule 2 (ICAM | 8.30 | 1168 |
| 422667 | H25642 | | ESTs | 8.29 | 1670 |
| 419047 | AW952771 | Hs.90043 | ESTs | 8.28 | 1269 |
| 417011 | F08212 | Hs.234898 | ESTs, Weakly similar to 2109260A B cell | 8.13 | 1051 |
| 451529 | AI917901 | Hs.208641 | ESTs | 8.13 | 4226 |
| 447540 | AL135716 | Hs.263780 | ESTs | 8.12 | 3876 |
| 449787 | AA005341 | | ESTs | 8.06 | 4082 |
| 409586 | AL050214 | Hs.55044 | DKFZP586H2123 protein | 8.02 | 385 4828 |
| 446161 | AA628206 | Hs.14125 | p53 regulated PA26 nuclear protein | 8.01 | 3729 |
| 435359 | T60843 | Hs.189679 | ESTs | 8.00 | 2909 |
| 413190 | AA151802 | Hs.40368 | adaptor-related protein complex 1, sigma | 8.00 | 698 |
| 428748 | AW593206 | Hs.98785 | Ksp37 protein | 7.99 | 2290 |
| 450787 | AB006190 | Hs.25475 | aquaporin 7 | 7.96 | 4164 5735 |
| 428957 | NM_003881 | Hs.194679 | WNT1 inducible signaling pathway protein | 7.95 | 2319 5384 |
| 427544 | AI767152 | Hs.181400 | ESTs, Weakly similar to I78885 serine/th | 7.88 | 2163 |
| 451583 | AI653797 | Hs.24133 | ESTs | 7.82 | 4230 |
| 408988 | AL119844 | Hs.49476 | Homo sapiens clone TUA8 Cri-du-chat regi | 7.81 | 320 |
| 414555 | N98569 | Hs.76422 | phospholipase A2, group IIA (platelets, | 7.81 | 844 |
| 438411 | H91928 | Hs.169370 | gb: ys81c10.r1 Soares retina N2b4HR Homo | 7.81 | 3137 |
| 439551 | W72062 | Hs.11112 | ESTs | 7.81 | 3214 |
| 415165 | AW887604 | Hs.78065 | complement component 7 | 7.81 | 913 |
| 408741 | M73720 | Hs.646 | carboxypeptidase A3 (mast cell) | 7.80 | 300 4805 |
| 422033 | AW245805 | Hs.110903 | claudin 5 (transmembrane protein deleted | 7.78 | 1594 |
| 439310 | AF086120 | Hs.102793 | ESTs | 7.69 | 3198 |
| 442831 | AI798959 | Hs.131686 | ESTs | 7.66 | 3473 |
| 429697 | AW296451 | Hs.24605 | ESTs | 7.66 | 2407 |
| 452390 | AI864142 | Hs.29288 | hypothetical protein FLJ21865 | 7.65 | 4303 |
| 421964 | X73079 | Hs.288579 | polymeric immunoglobulin receptor | 7.65 | 1586 5131 |
| 427164 | AB037721 | Hs.173871 | KIAA1300 protein | 7.65 | 2129 5332 |
| 424580 | AA446539 | Hs.339024 | ESTs, Weakly similar to A46010 X-linked | 7.65 | 1860 |
| 448710 | T62926 | Hs.304184 | ESTs | 7.63 | 3999 |
| 429580 | AA346839 | Hs.209100 | DKFZP434C171 protein | 7.58 | 2390 |
| 410611 | AW954134 | Hs.20924 | KIAA1628 protein | 7.58 | 497 |
| 451154 | AA015879 | Hs.33536 | ESTs | 7.58 | 4198 |
| 420311 | AW445044 | Hs.38207 | Human DNA sequence from clone RP4-530I15 | 7.57 | 1409 |
| 429640 | U83508 | Hs.2463 | angiopoietin 1 | 7.57 | 2400 5419 |
| 421124 | AI366452 | Hs.184430 | ESTs | 7.55 | 1483 |
| 409007 | AL122107 | Hs.49599 | Homo sapiens mRNA; cDNA DKFZp434G0827 (f | 7.52 | 322 |
| 411955 | X05153 | Hs.72938 | lactalbumin, alpha- | 7.49 | 4871 592 |
| 407828 | AW959500 | Hs.49597 | retinoic acid induced 2 | 7.49 | 203 |
| 417355 | D13168 | Hs.82002 | endothelin receptor type B | 7.48 | 1085 4981 |
| 429297 | X82494 | Hs.198862 | fibulin 2 | 7.45 | 2352 5399 |
| 426406 | AI742501 | Hs.169756 | complement component 1, s subcomponent | 7.45 | 2062 |
| 409472 | BE154093 | | gb: PM1-HT0340-091199-001-h02 HT0340 Homo | 7.42 | 378 |
| 449916 | T60525 | Hs.299221 | pyruvate dehydrogenase kinase, isoenzyme | 7.38 | 4090 |
| 433855 | AA834082 | Hs.307559 | ESTs | 7.37 | 2792 |
| 442915 | AA852875 | Hs.8850 | a disintegrin and metalloproteinase doma | 7.36 | 3480 |
| 409385 | AA071267 | | gb: zm61g01.r1 Stratagene fibroblast (937 | 7.31 | 365 |
| 451573 | AW130351 | | ESTs | 7.30 | 4229 |
| 444637 | T19101 | Hs.11494 | fibulin 5 | 7.29 | 3614 |
| 442070 | BE244622 | Hs.8084 | hypothetical protein dJ465N24.2.1 | 7.29 | 3394 |
| 458081 | AW014287 | Hs.41587 | RAD50 (S. cerevisiae) homolog | 7.28 | 4609 |
| 426992 | BE244961 | Hs.343200 | FE65-LIKE 2 | 7.26 | 2118 |
| 420570 | AI453665 | Hs.290870 | ESTs, Weakly similar to I38588 reverse t | 7.24 | 1434 |
| 401929 | | | C17001690: gi\|6005701\|ref\|NP_009099.1\|AT | 7.23 | |
| 449109 | AW270992 | Hs.120949 | ESTs, Weakly similar to ALU7_HUMAN ALU S | 7.21 | 4037 |
| 453510 | AI699482 | Hs.42151 | ESTs | 7.18 | 4415 |
| 405443 | | | Target Exon | 7.15 | |
| 432519 | AI221311 | Hs.130704 | ESTs, Weakly similar to BCHUIA S-100 pro | 7.14 | 2676 |
| 417054 | AF017060 | | aldehyde oxidase 1 | 7.13 | 1058 4977 |
| 459501 | AA854133 | Hs.310462 | ESTs | 7.10 | 4668 |
| 410057 | R66634 | Hs.268107 | multimerin | 7.09 | 436 |
| 425438 | T62216 | Hs.270840 | ESTs | 7.09 | 1963 |
| 447109 | X69086 | Hs.286161 | Homo sapiens cDNA FLJ13613 fis, clone PL | 7.07 | 3822 5681 |
| 444331 | AW193342 | Hs.24144 | ESTs | 7.04 | 3590 |
| 452040 | AW973242 | Hs.293690 | ESTs, Weakly similar to I38022 hypotheti | 7.04 | 4265 |
| 453870 | AW385001 | Hs.8042 | Homo sapiens cDNA: FLJ23173 fis, clone L | 7.02 | 4439 |
| 413497 | BE177661 | | gb: RC1-HT0598-020300-011-h02 HT0598 Homo | 7.01 | 729 |
| 431728 | NM_007351 | Hs.268107 | multimerin | 7.00 | 2593 5490 |
| 417780 | Z43482 | | collagen, type XI, alpha 1 | 7.00 | 1123 |
| 409060 | AI815867 | Hs.50130 | necdin (mouse) homolog | 6.99 | 328 |
| 423099 | NM_002837 | Hs.123641 | protein tyrosine phosphatase, receptor t | 6.98 | 1718 5168 |
| 419846 | NM_015977 | Hs.285681 | Williams-Beuren syndrome chromosome regi | 6.97 | |
| 414516 | AI307802 | | ESTs, Weakly similar to T43458 hypotheti | 6.97 | 838 |
| 425023 | AW956889 | Hs.154210 | EDG-1 (endothelial differentiation, sph | 6.93 | 1913 |
| 426822 | W78950 | Hs.220823 | ESTs | 6.92 | 2103 |
| 418283 | S79895 | Hs.83942 | cathepsin K (pycnodysostosis) | 6.91 | 1175 5007 |
| 435256 | AF193766 | Hs.13872 | cytokine-like protein C17 | 6.90 | 2903 5564 |
| 428722 | U76456 | Hs.190787 | tissue inhibitor of metalloproteinase 4 | 6.89 | 2286 5372 |
| 423007 | AA320134 | Hs.196029 | Homo sapiens mRNA for KIAA 1657 protein, | 6.88 | 1709 |
| 408048 | NM_007203 | Hs.42322 | A kinase (PRKA) anchor protein 2 | 6.87 | 228 4788 |
| 426128 | NM_001471 | Hs.167017 | gamma-aminobutyric acid (GABA) B recepto | 6.87 | |
| 427283 | AL119796 | Hs.174185 | ectonucleotide pyrophosphatase/phosphodi | 6.86 | 2137 |
| 426322 | J05068 | Hs.2012 | transcobalamin I (vitamin B12 binding pr | 6.85 | 2052 5299 |
| 429609 | AF002246 | Hs.210863 | cell adhesion molecule with homology to | 6.84 | 2394 5414 |
| 442662 | U78168 | Hs.8578 | Rap1 guanine-nucleotide-exchange factor | 6.82 | 3459 5624 |
| 408491 | AI088063 | Hs.7882 | ESTs | 6.79 | 272 |
| 451820 | AW058357 | Hs.199248 | ESTs | 6.77 | 4251 |
| 409549 | AB029015 | Hs.54886 | phospholipase C, epsilon 2 | 6.75 | 383 4827 |
| 421255 | BE326214 | Hs.93813 | ESTs | 6.73 | 1497 |
| 425869 | AA524547 | Hs.160318 | FXYD domain-containing ion transport reg | 6.72 | 2008 |
| 412567 | AI750979 | Hs.74034 | Homo sapiens clone 24651 mRNA sequence | 6.71 | 646 |
| 427019 | AA001732 | Hs.173233 | hypothetical protein FLJ10970 | 6.71 | 2122 |
| 443172 | AW662964 | Hs.199061 | p300/CBP-associated factor | 6.70 | 3502 |
| 414716 | AF199598 | Hs.97044 | Kv channel-interacting protein 2 | 6.70 | 4925 868 |
| 408731 | R85652 | | Homo sapiens mRNA; cDNA DKFZp434F1928 (f | 6.69 | 298 |
| 414522 | AW518944 | Hs.76325 | Immunoglobulin J chain | 6.67 | 840 |
| 412802 | U41518 | Hs.74602 | aquaporin 1 (channel-forming integral pr | 6.63 | 4887 671 |
| 425187 | AW014486 | Hs.22509 | ESTs | 6.61 | 1935 |
| 407938 | AA905097 | Hs.85050 | phospholamban | 6.60 | 216 |
| 443282 | T47764 | Hs.132917 | ESTs | 6.60 | 3517 |
| 444213 | T79623 | Hs.263351 | ESTs | 6.58 | 3584 |
| 407492 | S83198 | | gb: BPLP = basic proline-rich protein [huma | 6.57 | 165 4773 |
| 446714 | W73818 | Hs.110028 | ESTs | 6.57 | 3777 |
| 421853 | AL117472 | Hs.108924 | SH3-domain protein 5 (ponsin) | 6.55 | 1571 5125 |
| 417728 | AW138437 | Hs.24790 | KIAA1573 protein | 6.54 | 1117 |
| 452516 | AA058630 | Hs.29759 | RNA POLYMERASE I AND TRANSCRIPT RELEASE | 6.52 | 4320 |
| 406692 | L36607 | | gb: Homo sapiens (clone 22) pregnancy-spe | 6.51 | 4749 87 |
| 424252 | AK000520 | Hs.143811 | hypothetical protein FLJ20513 | 6.49 | 1821 5206 |
| 420832 | Z26248 | Hs.99962 | proteoglycan 2, bone marrow (natural kil | 6.48 | 1458 5089 |
| 414665 | AA160873 | | serum amyloid A1 | 6.48 | 859 |
| 443980 | AI459140 | Hs.109150 | ESTs | 6.47 | 3565 |
| 414742 | AW370946 | Hs.23457 | ESTs | 6.47 | 872 |
| 418728 | AW970937 | Hs.293843 | ESTs | 6.46 | 1232 |
| 419195 | AW291165 | Hs.25447 | ESTs | 6.45 | 1287 |
| 453880 | AI803166 | Hs.135121 | ESTs, Weakly similar to I38022 hypotheti | 6.43 | 4443 |
| 444561 | NM_004469 | Hs.11392 | c-fos induced growth factor (vascular en | 6.41 | 3606 5641 |
| 433793 | AW975959 | Hs.107513 | ESTs, Moderately similar to KIAA1058 pro | 6.41 | 2788 |
| 427809 | M26380 | Hs.180878 | lipoprotein lipase | 6.38 | 2196 |
| 443627 | AW138605 | Hs.134198 | ESTs | 6.36 | 3534 |
| 428411 | AW291464 | Hs.10338 | ESTs | 6.35 | 2251 |
| 421368 | L13283 | Hs.103944 | Homo sapiens (clone MG2-5-12) mucin (MG2 | 6.34 | 1514 |
| 430234 | N29317 | | KIAA1238 protein | 6.34 | 2457 |
| 423201 | NM_000163 | Hs.125180 | growth hormone receptor | 6.34 | 1728 5175 |
| 432030 | AI908400 | Hs.143789 | ESTs | 6.33 | 2628 |
| 422722 | H74219 | Hs.269772 | ESTs | 6.33 | 1675 |
| 411764 | T40064 | Hs.71968 | Homo sapiens mRNA; cDNA DKFZp564F053 (fr | 6.31 | 575 |
| 438414 | AA806794 | Hs.131511 | ESTs | 6.29 | 3138 |
| 446939 | AL133353 | Hs.16606 | CGI-32 protein | 6.28 | 3804 |
| 421465 | AK001020 | Hs.104627 | Homo sapiens cDNA FLJ10158 fis, clone HE | 6.28 | 1523 |
| 453467 | AI535997 | Hs.30089 | ESTs | 6.27 | 4410 |
| 435545 | AA687415 | Hs.28107 | ESTs | 6.25 | 2926 |
| 407172 | T54095 | | gb: ya92c05.s1 Stratagene placenta (93722 | 6.24 | 132 |
| 448406 | AW772298 | Hs.21103 | Homo sapiens mRNA; cDNA DKFZp564B076 (fr | 6.23 | 3964 |
| 417788 | AI436699 | Hs.84928 | nuclear transcription factor Y, beta | 6.22 | 1124 |
| 418452 | BE379749 | Hs.85201 | C-type (calcium dependent, carbohydrate- | 6.21 | 1202 |
| 431177 | NM_003304 | Hs.250687 | transient receptor potential channel 1 | 6.20 | 2536 5471 |
| 429331 | H13881 | Hs.143825 | ESTs | 6.20 | 2354 |
| 419925 | AA159850 | Hs.93765 | lipoma HMGIC fusion partner | 6.19 | 1370 |
| 453125 | AW779544 | Hs.115497 | hypothetical protein FLJ22655 | 6.19 | 4376 |
| 438303 | AB028998 | Hs.6147 | KIAA1075 protein | 6.15 | 3130 5593 |
| 427620 | NM_003705 | Hs.179866 | solute carrier family 25 (mitochondrial | 6.14 | 2172 5341 |
| 412568 | AI878826 | Hs.74034 | caveolin 1, caveolae protein, 22 kD | 6.06 | 647 |
| 435487 | W07343 | Hs.182538 | phospholipid scramblase 4 | 6.05 | 2919 |
| 420103 | AA382259 | Hs.95197 | aldehyde dehydrogenase 1 family, member | 6.02 | 1384 |
| 418336 | BE179882 | | glutathione peroxidase 3 (plasma) | 6.02 | 1188 |
| 448782 | AL050295 | | G-protein coupled receptor 116 (GPR116) | 6.01 | 4006 5713 |
| 407939 | W05608 | Hs.312679 | ESTs, Weakly similar to A49019 dynein he | 5.99 | 217 |
| 430714 | AA484757 | Hs.287601 | Homo sapiens cDNA FLJ13830 fis, clone TH | 5.99 | 2509 |
| 413630 | AL036883 | Hs.75450 | delta sleep inducing peptide, immunoreac | 5.98 | 742 |
| 417280 | AW173116 | Hs.250103 | ESTs | 5.98 | 1076 |
| 424880 | NM_000328 | Hs.153614 | retinitis pigmentosa GTPase regulator | 5.97 | 1895 5236 |
| 413200 | AA127395 | Hs.222414 | ESTs | 5.97 | 700 |
| 431704 | NM_006680 | Hs.2838 | malic enzyme 3, NADP()-dependent, mitoch | 5.96 | 2586 5487 |
| 447770 | AB032417 | Hs.19545 | frizzled (Drosophila) homolog 4 | 5.96 | 3904 5701 |
| 421237 | U25029 | Hs.102761 | Human glucocorticoid receptor alpha mRNA | 5.95 | 1493 5099 |
| 449539 | W80363 | Hs.58446 | ESTs | 5.95 | 4065 |
| 451108 | AW268884 | Hs.204387 | ESTs | 5.94 | 4194 |
| 430520 | NM_016190 | Hs.242057 | chromosome 1 open reading frame 10 | 5.94 | 2492 5454 |
| 419290 | AI128114 | Hs.112885 | spinal cord-derived growth factor-B | 5.93 | 1298 |
| 445234 | AW137636 | Hs.146059 | ESTs | 5.92 | 3860 |
| 446874 | AW968304 | Hs.56156 | ESTs | 5.92 | 3798 |
| 422994 | AW891802 | Hs.296276 | ESTs | 5.89 | 1707 |
| 425009 | X58288 | Hs.154151 | protein tyrosine phosphatase, receptor t | 5.89 | 1911 5243 |
| 422109 | S73265 | Hs.1473 | gastrin-releasing peptide | 5.88 | 1604 5138 |
| 416336 | R97949 | Hs.24128 | ESTs | 5.87 | 987 |
| 441944 | AW855861 | Hs.8025 | Homo sapiens clone 23767 and 23782 mRNA | 5.86 | 3381 |
| 447384 | AI377221 | Hs.40528 | ESTs | 5.86 | 3853 |
| 407978 | AW385129 | Hs.41717 | phosphodiesterase 1A, calmodulin-depende | 5.86 | 220 |
| 454338 | AW381251 | | gb: RC0-HT0297-301099-011-a08 HT0297 Homo | 5.85 | 4477 |
| 435266 | AK001942 | Hs.4863 | hypothetical protein DKFZp566A1524 | 5.85 | 2904 |
| 447571 | AF274863 | Hs.18889 | DKFZP434M183 protein | 5.85 | 3880 5693 |
| 432608 | AI492660 | Hs.170935 | ESTs | 5.83 | 2684 |
| 412420 | AL035668 | Hs.73853 | bone morphogenetic protein 2 | 5.79 | 4878 629 |
| 428809 | W56487 | Hs.193784 | Homo sapiens mRNA; cDNA DKFZp586K1922 (f | 5.77 | 2302 |
| 412622 | AW664708 | Hs.171959 | ESTs | 5.75 | 651 |
| 439177 | AW820275 | Hs.76611 | ESTs, Weakly similar to I38022 hypotheti | 5.75 | 3189 |
| 450954 | AI904740 | Hs.25691 | receptor (calcitonin) activity modifying | 5.74 | 4178 |
| 416889 | AW250318 | Hs.80395 | mal, T-cell differentiation protein | 5.74 | 1034 |
| 418965 | AI002238 | Hs.11482 | splicing factor, arginine/serine-rich 11 | 5.74 | 1264 |
| 436473 | AI193122 | Hs.132275 | ESTs | 5.73 | 2987 |
| 430733 | AW975920 | Hs.121036 | ESTs | 5.73 | 2510 |
| 426628 | AW901932 | Hs.278582 | v-akt murine thymoma viral oncogene Homo | 5.70 | 2084 |
| 447894 | AW204253 | Hs.21912 | ESTs | 5.70 | 3919 |
| 424585 | AA464840 | Hs.131987 | ESTs | 5.68 | 1862 |
| 410485 | AW750242 | | gb: RC1-BT0567-301299-011-e02 BT0567 Homo | 5.66 | 483 |
| 439484 | AW970218 | Hs.135254 | Homo sapiens clone 1 thrombospondin mRNA | 5.64 | 3211 |
| 459247 | N46243 | Hs.110373 | ESTs, Highly similar to T42626 secreted | 5.64 | 4662 |
| 416749 | AW068550 | Hs.79732 | fibulin 1 | 5.64 | 1020 |
| 452093 | AA447453 | Hs.27860 | Homo sapiens mRNA; cDNA DKFZp586M0723 (f | 5.62 | 4269 |
| 443510 | NM_012190 | Hs.9520 | formyltetrahydrofolate dehydrogenase | 5.62 | 3526 5628 |
| 407374 | AA724738 | Hs.131034 | ESTs, Weakly similar to I78885 serine/th | 5.62 | 157 |
| 417317 | AW296584 | Hs.293782 | ESTs | 5.62 | 1080 |
| 407960 | F34014 | Hs.62914 | ESTs | 5.61 | 219 |
| 420733 | AW291446 | Hs.88651 | ESTs | 5.61 | 1446 |
| 443605 | H06865 | Hs.134131 | ESTs | 5.59 | 3531 |
| 406694 | M94891 | Hs.225932 | pregnancy specific beta-1-glycoprotein 7 | 5.57 | 4750 88 |
| 421177 | AW070211 | Hs.102415 | Homo sapiens mRNA; cDNA DKFZp586N0121 (f | 5.56 | 1485 |
| 427136 | AL117415 | Hs.173716 | a disintegrin and metalloproteinase doma | 5.55 | 2126 |
| 431981 | AA664069 | Hs.115779 | ESTs | 5.55 | 2623 |
| 421712 | AK000140 | Hs.107139 | hypothetical protein | 5.53 | 1556 |
| 426485 | NM_006207 | Hs.170040 | platelet-derived growth factor receptor- | 5.51 | 2069 5306 |
| 419150 | T29618 | Hs.89640 | TEK tyrosine kinase, endothelial (venous | 5.51 | 1282 |
| 420517 | AB011115 | Hs.98507 | KIAA0543 protein | 5.50 | 1425 5078 |
| 450253 | AL133047 | Hs.24715 | Homo sapiens mRNA; cDNA DKFZp434D0215 (f | 5.49 | 4119 5727 |
| 402575 | | | Rho GTPase activating protein 1 | 5.49 | |
| 447974 | R76886 | | gb: yi64b03.s1 Soares placenta Nb2HP Homo | 5.49 | 3930 |
| 429610 | AB024937 | Hs.211092 | LUNX protein; PLUNC (palate lung and nas | 5.48 | 2395 5415 |
| 424789 | BE176694 | Hs.279860 | tumor protein, translationally-controlle | 5.48 | 1886 |
| 428695 | AI355647 | Hs.189999 | purinergic receptor (family A group 5) | 5.46 | 2282 |
| 436805 | AA731533 | Hs.270751 | ESTs | 5.46 | 3008 |
| 459513 | AI032946 | | gb: ox06g09.s1 Soares_fetal_liver_spleen_{—} | 5.45 | 4671 |
| 418481 | M81945 | | CD34 antigen | 5.44 | 1206 5018 |
| 414121 | AA151719 | Hs.95834 | ESTs | 5.44 | 790 |
| 410544 | AI446543 | Hs.95511 | ESTs | 5.44 | 489 |
| 407221 | U25987 | | pregnancy specific beta-1-glycoprotein 9 | 5.43 | 138 4765 |
| 436062 | AK000027 | Hs.98633 | ESTs | 5.43 | 2962 |
| 417696 | BE241624 | Hs.82401 | CD69 antigen (p60, early T-cell activati | 5.43 | 1113 |
| 434230 | AA551569 | | hypothetical protein PRO2822 | 5.42 | 2823 |
| 421429 | NM_014922 | Hs.104305 | death effector filament-forming Ced-4-li | 5.41 | 1517 5106 |
| 438797 | C16161 | Hs.283040 | hypothetical protein PRO2543 | 5.40 | 3166 |
| 454043 | AW451951 | Hs.29041 | Homo sapiens cDNA FLJ14177 fis, clone NT | 5.38 | 4464 |
| 428531 | AW274831 | | ESTs | 5.37 | 2267 |
| 437891 | AW006969 | Hs.6311 | hypothetical protein FLJ20859 | 5.35 | 3103 |
| 442713 | D63203 | Hs.184627 | KIAA0118 protein | 5.35 | 3462 |
| 449282 | AL048056 | Hs.23437 | Homo sapiens cDNA FLJ13555 fis, clone PL | 5.34 | 4054 |
| 407247 | S83198 | Hs.87198 | basic proline-rich protein | 5.34 | 145 4769 |
| 414831 | M31158 | Hs.77439 | protein kinase, cAMP-dependent, regulato | 5.34 | 4931 883 |
| 410116 | AW630671 | Hs.58636 | squamous cell carcinoma antigen recogniz | 5.33 | 447 |
| 426354 | NM_004010 | Hs.169470 | dystrophin (muscular dystrophy, Duchenne | 5.33 | 2057 |
| 430265 | L36033 | Hs.237356 | stromal cell-derived factor 1 | 5.33 | 2458 5439 |
| 433688 | AA628467 | Hs.112572 | Homo sapiens cDNA FLJ14130 fis, clone MA | 5.33 | 2780 |
| 428939 | AW236550 | Hs.131914 | ESTs | 5.32 | 2318 |
| 427605 | NM_000997 | Hs.337445 | ribosomal protein L37 | 5.31 | 2171 5340 |
| 433138 | AB029496 | Hs.59729 | semaphorin sem2 | 5.30 | 2737 5528 |
| 441319 | AI354869 | Hs.133081 | ESTs, Weakly similar to T08700 hypotheti | 5.30 | 3346 |
| 450389 | AW014016 | | ESTs | 5.29 | 4136 |
| 406686 | M37755 | | gb: Human pregnancy-specific beta-1-glyco | 5.29 | 4746 84 |
| 428336 | AA503115 | Hs.183752 | microseminoprotein, beta- | 5.29 | 2242 |
| 442287 | AW952703 | Hs.8182 | synaptic nuclei expressed gene 1b | 5.28 | 3411 |
| 422431 | AI769410 | Hs.221461 | ESTs | 5.28 | 1646 |
| 423023 | N50128 | Hs.173400 | ESTs | 5.25 | 1712 |
| 413802 | AW964490 | Hs.32241 | ESTs, Weakly similar to S65657 alpha-1C- | 5.25 | 754 |
| 446584 | U53445 | Hs.15432 | downregulated in ovarian cancer 1 | 5.25 | 3766 5673 |
| 432128 | AA127221 | Hs.296502 | Interleukin 1 receptor-like 1 | 5.25 | 2633 |
| 411151 | AW866497 | | gb: QV4-SN0024-170400-176-e07 SN0024 Homo | 5.24 | 538 |
| 412330 | NM_005100 | Hs.788 | A kinase (PRKA) anchor protein (gravin) | 5.24 | 4877 625 |
| 452422 | AA521416 | | tumor necrosis factor receptor superfami | 5.24 | 4305 |
| 424244 | AV647184 | Hs.143601 | hypothetical protein hCLA-iso | 5.24 | 1819 |
| 428280 | H05541 | Hs.183428 | sarcospan (Kras oncogene-associated gene | 5.23 | 2235 |
| 451683 | AI808964 | Hs.207673 | ESTs | 5.23 | 4239 |
| 441723 | R72137 | Hs.7949 | DKFZP586B2420 protein | 5.22 | 3370 |
| 408000 | L11690 | Hs.198689 | bullous pemphigoid antigen 1 (230/240 kD) | 5.22 | 223 4786 |
| 439091 | AA830144 | Hs.135613 | ESTs, Moderately similar to I38022 hypot | 5.21 | 3184 |
| 439411 | AA044876 | Hs.58043 | ESTs, Weakly similar to CYA2_HUMAN ADENY | 5.20 | 3206 |
| 419917 | AA320068 | Hs.93701 | Homo sapiens mRNA; cDNA DKFZp434E232 (fr | 5.20 | 1369 |
| 458616 | AV656098 | Hs.172382 | betaine-homocysteine methyltransferase 2 | 5.19 | 4629 |
| 444523 | AW409958 | Hs.323396 | hypothetical protein RP1-317E23 | 5.19 | 3604 |
| 406714 | AI219304 | Hs.266959 | hemoglobin, gamma G | 5.19 | 92 |
| 437140 | AA312799 | Hs.283689 | activator of CREM in testis | 5.19 | 3035 |
| 427890 | AA435761 | | ESTs | 5.18 | 2203 |
| 408776 | AA057365 | | ESTs, Weakly similar to I38022 hypotheti | 5.18 | 306 |
| 407571 | AI446183 | Hs.9572 | ESTs, Highly similar to CYA5_HUMAN ADENY | 5.17 | 170 |
| 407183 | AA358015 | | gb: EST66864 Fetal lung III Homo sapiens | 5.16 | 134 |
| 414005 | AA134489 | | ESTs | 5.16 | 773 |
| 449679 | AI823951 | Hs.129700 | tolloid-like 1 | 5.15 | 4073 |
| 436306 | AA805939 | Hs.117927 | ESTs | 5.15 | 2978 |
| 408221 | AA912183 | Hs.47447 | ESTs | 5.14 | 246 |
| 412668 | AA456195 | | hypothetical protein FLJ14621 | 5.14 | 658 |
| 443547 | AW271273 | | hypothetical protein FLJ12666 | 5.14 | 3529 |
| 449365 | AW968261 | Hs.118913 | ESTs, Moderately similar to T46371 hypot | 5.12 | 4058 |
| 433165 | AA578904 | Hs.292437 | ESTs | 5.12 | 2743 |
| 417067 | AJ001417 | Hs.81086 | solute carrier family 22 (extraneuronal | 5.12 | 1060 4978 |
| 437948 | AA772920 | Hs.303527 | ESTs | 5.12 | 3110 |
| 447391 | AI377444 | Hs.54245 | ESTs, Weakly similar to S65824 reverse t | 5.11 | 3855 |
| 437652 | AF036144 | Hs.5734 | meningioma expressed antigen 5 (hyaluron | 5.11 | 3078 5588 |
| 434633 | AI189587 | Hs.120915 | ESTs | 5.10 | 2855 |
| 421341 | AJ243212 | | deleted in malignant brain tumors 1 | 5.10 | 1509 5102 |
| 420908 | AL049974 | Hs.100261 | Homo sapiens mRNA; cDNA DKFZp564B222 (fr | 5.10 | 1462 |
| 410526 | R05652 | Hs.64125 | Homo sapiens clone 24617 mRNA sequence | 5.09 | 488 |
| 412460 | AW953287 | Hs.83071 | ESTs | 5.09 | 635 |
| 451245 | AA016218 | Hs.58231 | ESTs | 5.08 | 4203 |
| 444880 | AW118683 | Hs.154150 | ESTs | 5.08 | 3636 |
| 448425 | AI500359 | | ESTs | 5.07 | 3968 |
| 421932 | W51778 | Hs.323949 | kangai 1 (suppression of tumorigenicity | 5.06 | 1581 |
| 433854 | AA610649 | Hs.333239 | ESTs | 5.06 | 2791 |
| 451742 | T77609 | | ankyrin 2, neuronal | 5.05 | 4245 |
| 431176 | AI026984 | Hs.293662 | ESTs | 5.05 | 2535 |
| 445399 | AI681906 | Hs.4786 | Homo sapiens cDNA: FLJ22849 fis, clone K | 5.05 | 3674 |
| 437027 | A8023235 | Hs.5400 | KIAA1018 protein | 5.05 | 3030 5583 |
| 432527 | AW975028 | Hs.102754 | ESTs | 5.04 | 2677 |
| 433740 | AA934994 | Hs.112628 | ESTs | 5.03 | 2785 |
| 431638 | NM_000916 | Hs.2820 | oxytocin receptor | 5.02 | 2579 5484 |
| 436037 | AA917639 | Hs.13063 | ESTs | 5.02 | 2958 |
| 423488 | AW748714 | Hs.194720 | gb: QV3-BT0294-241199-025-c01 BT0294 Homo | 5.02 | 1751 |
| 426464 | NM_004334 | Hs.169998 | bone marrow stromal cell antigen 1 | 5.02 | 2067 5304 |
| 450697 | AW152166 | Hs.182113 | ESTs | 5.01 | 4151 |
| 436169 | AA888311 | Hs.17602 | Homo sapiens cDNA FLJ12381 fis, clone MA | 5.01 | 2966 |
| 453143 | AA382234 | | protein tyrosine phosphatase, receptor t | 5.01 | 4378 |
| 414545 | AA149287 | Hs.76605 | ESTs | 5.00 | 843 |
| 421126 | M74587 | Hs.102122 | insulin-like growth factor binding prote | 4.99 | 1484 5095 |
| 413401 | AI361861 | Hs.118659 | ESTs | 4.98 | 714 |
| 436919 | AW297307 | Hs.204562 | ESTs | 4.97 | 3021 |
| 453828 | AW970960 | Hs.293821 | ESTs | 4.96 | 4433 |
| 418318 | U47732 | Hs.84072 | transmembrane 4 superfamily member 3 | 4.95 | 1182 |
| 408669 | AI493591 | Hs.78146 | platelet/endothelial cell adhesion molec | 4.94 | 290 |
| 414919 | AW087337 | Hs.194461 | ESTs | 4.94 | 893 |
| 438608 | AI380529 | Hs.44628 | ESTs | 4.94 | 3152 |
| 414138 | AA135884 | Hs.3772 | ESTs | 4.94 | 791 |
| 434365 | AI073378 | Hs.126793 | ESTs | 4.94 | 2834 |
| 408242 | AA251594 | Hs.43913 | PIBF1 gene product | 4.94 | 247 |
| 437773 | U24186 | Hs.283018 | replication protein A complex 34 kd subu | 4.93 | 3090 5592 |
| 445529 | H14421 | Hs.180513 | ATP-binding cassette, sub-family A (ABC1 | 4.93 | 3683 |
| 434389 | AA971235 | Hs.128098 | ESTs | 4.90 | 2837 |
| 407758 | D50915 | Hs.38365 | KIAA0125 gene product | 4.90 | 192 4782 |
| 424776 | AI867931 | Hs.164595 | ESTs | 4.89 | 1885 |
| 448122 | AW665656 | Hs.173187 | ESTs | 4.88 | 3946 |

Pkey: Unique Eos probeset identifier number
ExAccn: Exemplar Accession number, Genbank accession number
UniGeneID: UniGene number
UniGene Title: UniGene gene title
R1: 90th percentile of breast metastases to the brain Als divided by the 90th percentile of normal breast tissue Als, where the 15th percentile of all normal body tissue Als was subtracted from the both numerator and denominator.
SEQ ID NO(s): SEQ ID number(s) for nucleic acid and protein sequences associated with table entry.

[0350] TABLE 5B

| Pkey | CAT number | Accession |
|---|---|---|
| 421998 | 133592_1 | B1757233 BG911321 BF351759 AW244016 AW026834 AW024260 AI420138 AA779354 AI093360 AI934858 AW151292 AI373133 AI335587 |
| | | AI969728 AAI01632 BE218525 AI802114 AI783721 AA845265 AW088826 AI832852 F03967 AI611148 AI720358 AW293764 N91161 |
| | | R79192 W85852 AW771263 BG820263 BG012864 R74441 R86080 W04256 BE707244 BF899452 BE327552 BE669500 AI492388 |
| | | AI241532 BF448184 AI209012 AA886528 N70309 AW582776 BF110563 BF448329 BE326537 AW770471 BF444926 BE674147 AI793266 |
| | | AI991774 AI807726 AI218667 AA301750 R44328 |
| 411962 | 2307710_1 | AA099050 AA099526 T47733 |
| 414496 | 1526_1 | AK058006 BF724822 W65303 AW887764 AW023806 Z25353 AW022095 AA730973 W00417 W73819 BF982096 AI927669 AW188021 |
| | | AW770478 AI913512 AA604358 AI697341 AI691028 AI338392 AI079403 H97538 AI144448 AI253102 AI051402 AI335900 AI868132 |
| | | N28900 H98465 AF268386 AI799915 AI819228 BE048413 AW304723 AI819923 BF223106 AA155907 AW298079 BF055272 BF446804 |
| | | BF197697 W58588 BF197538 AA032180 AA992597 AW590254 AA027824 AI129369 AI131331 AI655843 AA932907 AW104493 AI150615 |
| | | BF110226 AW172271 AI312659 AA057312 BE673669 AA722984 AW104985 AI129232 AI078648 AI653086 AI703481 AW515897 AI352206 |
| | | N67076 AW297281 AI686162 AA029184 AI610743 AW772016 AI091778 W65401 AI687374 AI218085 AI765158 AI018002 AI653068 |
| | | AI335704 AI520850 AW275228 AW275204 AI420247 AA975336 AI697042 AW182235 AA736386 AI281682 AW169698 AW263325 |
| | | BE645834 AI377438 AI146706 AA613808 AA716538 B1496247 AA032248 AI698930 AI193399 N70026 H86792 AA404489 W61267 |
| | | BF447230 AA910805 AA150774 AA621907 AA902526 AI827634 AW022037 BF059000 BI496246 BG577007 BG571077 AA460779 |
| | | AW816890 AW816893 AW816891 AA029183 AA010295 H86850 T83320 BE160823 H12925 N40087 AA096372 BE160847 AW816892 |
| | | AW816889 AW816882 AW816868 AW816941 AW816578 AW816940 AWB16577 AI431628 AI828113 AA033677 AA033654 AA452704 |
| | | AA317582 AA346971 BF836584 H48669 B1861605 BG925200 AA463277 H89048 AAI55952 W03252 W01510 W00915 W58589 AA164519 |
| | | N24017 N24622 N27149 N70109 R43771 AA010296 W84611 H98889 H88965 AW594424 AA034139 AA065223 N99696 BG981481 N94371 |
| | | AA767970 W47146 N70977 H05510 W61268 T90796 AA164518 W47244 AA150883 AA034138 BF338483 F13671 H51317 W72716 N21488 AI188071 AI370541 AI754442 |
| | | AA148524 AI749182 W95221 W92522 R20385 |
| 407102 | 7177_2 | AW945170 BF930905 F33652 BG057818 AI368018 AI421485 AI300352 AI378525 AI264177 AI276281 AI245302 AI281050 AI190036 |
| | | AW451438 AW242903 AA910870 F22289 F19647 F22375 AW473816 BF445785 AA774528 F33447 C01077 AW772227 F17759 H42812 |
| | | R09701 AA349096 R48772 H42892 H42537 R47898 N28263 H25721 F32386 H43971 R48205 F21390 H45809 AA007629 R47897 R83734 |
| | | H45844 AW983653 H43970 H42536 H24495 R48875 H42961 H22079 R86018 |
| 406800 | 0_0 | AA505535 |
| 412295 | 133592_1 | B1757233 BG911321 BF351759 AW244016 AW026834 AW024260 AI420138 AA779354 AI093360 AI934858 AW151292 AI373133 AI335587 |
| | | AI969728 AA101632 BE218525 AI802114 AI783721 AA845265 AW088826 AI832852 F03967 AI611148 AI720358 AW293764 N91161 |
| | | R79192 W85852 AW771263 BG820263 BG012864 R74441 R86080 W04256 BE707244 BF899452 BE327552 BE669500 AI492388 |
| | | AI241532 BF448184 AI209012 AA886528 N70309 AW582776 BF110563 BF448329 BE326537 AW770471 BF444926 BE674147 AI793266 |
| | | AI991774 AI807726 AI218667 AA301750 R44328 |
| 408503 | 24663_2 | NM_054110 BC014789 BI552129 BG896227 BG900557 AY035399 AW119059 BF432376 AW629242 AA971319 AI378176 AI275884 |
| | | AA236602 BG898257 BG897636 BG900588 AF361251 BG926353 BG714178 AA368180 BG896473 BG715977 BG900230 BG901163 |
| | | BF342939 |
| 444567 | 42058_1 | BE048349 AW974054 R79064 AA854763 AA780852 AW129141 AI061419 AW469162 AA602558 AA975901 H65073 H94455 AA969673 |
| | | BE048171 R63499 R92783 N68673 R62964 R31280 AA873363 R92768 AI740671 N41012 H72843 N54939 N91687 H58308 N53116 |
| | | AV650793 AV650271 BI489336 R28494 |
| 422667 | 224778_1 | AI758223 AW469334 BF940841 AW080348 AI270363 AI055892 BE464168 BF431797 BE350144 BF448739 AI693409 BF432999 D62848 |
| | | AA398070 AI383375 AW611490 |
| 449787 | 79759_1 | AW975633 AW961632 AA322539 AW513289 AI864190 AW073506 AI016894 AA747635 AA730405 AA418033 AI609549 AI873981 |
| | | AA005341 BE182658 AA004291 |
| 409472 | 813633_1 | BE162685 BE154093 BE154085 |
| 409385 | 110758_1 | T65940 T64515 AA071267 AA071334 |
| 451573 | 625119_1 | AW338699 AI803973 AW130351 |
| 417054 | 12405_2 | BG533564 BG618564 AW296119 AI269233 BF508328 AW364777 AW292258 AA371049 AI452471 AI092522 BG618376 AL049080 |
| | | AA631068 BG564643 T53833 AV702544 BG533452 AV705004 AA588281 T28665 BG569026 AV646874 AV647253 AV647455 AV647749 |
| | | BI759444 AV652457 AV695354 AV696010 AV697248 BG617586 AV722549 AI435836 AI590676 AI245019 AW338243 AA530898 D52191 |
| | | AI435352 D57473 BG566952 AI420505 AA035245 AV704972 BG564113 AI439237 AI287456 AV695686 AA349017 |
| 413497 | 1518002_1 | BE177661 H06215 BE144709 BE144829 |
| 417780 | 2147534_1 | R14659 Z43482 R52906 |
| 414516 | 60847_1 | AK057782 AI146454 BG703115 AI765980 AI948611 AA889263 AA947457 BG547193 H11947 Z38147 F10426 BF447329 H11946 T74968 |
| | | F06195 BG548563 AI004988 AAI48735 AI307802 AI439791 BE041453 AI984904 AA148734 F12823 |
| 408731 | 11725_2 | AF305826 BE350971 AI765355 AW172600 AI310231 BM271766 AI547292 AW612019 AI674617 AW138666 AI147629 AI147620 BF857810 |
| | | BF886300 BF885952 BF886303 BF885956 BG565497 BE670834 AA114025 BF886396 BF886928 AV750861 D62864 |
| 407492 | 65295_1 | S83198 NM_021225 BG212392 BG218751 BG191209 BG212926 BG185436 |
| 406692 | 0_0 | L36607 |
| 414665 | 23751_3 | BG567713 AW665841 AI814924 AW978339 AW264036 AI373950 AW183157 AW082249 AI201658 AI364196 AA150743 AA160873 |
| | | AA453757 BF871646 BF871640 AA565311 AA989511 R10152 AA807154 T77900 AW51591 |
| 430234 | 1746_1 | AW025803 AL137567 AI760919 BE552289 AW082686 AA913951 BE501313 AV756373 BE048863 AA828185 BG151502 AI655583 |
| | | AW473377 AI949888 AA453495 AW130287 AI222766 AI862122 AI309288 AL038626 AA714749 AI719007 W95486 N29317 AW589706 |
| | | AA905486 AI744057 AA759318 AI084950 AI273294 BF835579 AW235310 AI914478 BF887920 R21884 AI479541 AW189671 AW235752 |
| | | AI762157 BG698714 AA461269 AA460813 W95524 AA301369 AI760649 BF854009 AW303856 H42831 AV37305 H03702 R22396 R65961 |
| 407172 | 452462_1 | BG925072 BG925045 AV738744 T54095 T54186 BI000208 BI003704 BI002312 BG990736 BI000200 BI004083 BI004085 BI000196 |
| | | BG990731 BG990735 |
| 418336 | 58817_1 | AW969583 BI772505 BE179578 AI493714 AI937718 AA663709 BI868925 AW138743 AI911314 BE645538 BG911947 AI380325 AI265803 |
| | | W56175 AI658779 AI675997 AW665991 AI459263 AI420121 Z38874 AA570115 AW301008 AA216257 BF062662 BI772789 H05989 |
| | | BF085523 BI001277 |
| 448782 | 34980_1 | AB018301 AL050295 BF513128 AW385080 AL551708 AI352542 AI829703 AI819388 AW629019 AW073189 AW273857 AW118768 |
| | | AI453845 AI452494 AA886341 AI057144 AA904647 AI423547 AW263913 AI094774 AI434419 AI039546 AI002491 AI240412 Z25099 |
| | | AA995178 AW050649 AW026140 AI796309 AI584012 BE166666 AI767991 AI309041 AA724059 AI695284 AI245095 T63971 Z40627 |
| | | BE166681 BG570071 BF921915 BI562702 BG506502 AV658066 R48378 AA121543 AI096938 AA618131 H40993 R48277 AI352281 |
| | | BG540263 BG538901 N95226 AI356752 AI221152 Z28777 R16574 AW966449 AA044116 AW797518 BI010405 AA044288 AI093508 BE140169 T64039 BG433106 AW130367 |
| | | AW130361 N73937 AA127680 AW044037 AI096437 AA384077 BF941499 T93764 BG003285 |
| 454338 | 788429_2 | AW381251 |
| 410485 | 1028443_1 | AW750242 T68507 |
| 447974 | 1092239_1 | BG944967 AI453674 R77049 R76886 |
| 459513 | 417837_1 | AV704062 BE162284 AI032946 BF360636 |
| 418481 | 17381_1 | S53911 NM_001773 AL572644 AL550179 AI688653 AW025002 AW614285 AU158779 AI017002 AA434387 AI252665 AI262206 AU147582 |
| | | AI144193 AW952860 AI128776 AI017793 AI160509 AA906021 AI149563 AU154950 AI128488 W74409 AI970362 AI141453 AU158772 |
| | | W58493 BM148338 R73091 AW020496 BI491517 AA022917 AI432610 AI879448 R69099 AI708954 AW014274 AA483672 AA528783 |
| | | AA912271 AI926942 BE677587 AI874217 AA152376 AA640408 AI287334 BF830285 AA311473 C18678 AA922603 C00910 AI124073 |
| | | R38730 AA043439 W94644 W58646 AA664247 BE061934 H01096 R69613 AI383162 AU133723 AA311526 R67942 H01097 H72113 |
| | | R72430 R39494 AV744074 AA535925 BI759288 BI052385 BF854687 AW608286 AA043438 R72478 AL513811 R69214 AA188435 |
| | | AA054965 |
| 434230 | 41110_1 | AF119900 NM_018539 AA702388 N53043 BF351064 N70103 AI207469 AA551569 AW383189 W00906 W00935 N54252 |
| 428531 | 715072_1 | AI672553 AW274831 AA429897 AA446046 AA860950 |
| 450389 | 2018_25 | AI694475 AW341358 AW014016 |
| 411151 | 1071416_1 | AW819775 AW866497 AW819868 AW866602 AW866561 |
| 452422 | 10123_3 | AK056500 AL520733 AA521416 AW967877 AI799849 AA470754 AI674241 AI343684 BF589270 AA026154 AI473803 AW612523 AI344466 |
| | | AI344464 AI216171 AA055926 AA255890 BF967590 AA055329 AA026153 W52679 AA135902 AI721140 C14114 R43875 AI761376 R58888 |
| | | AA135901 BF849170 AA725347 AI908777 AA719606 |
| 427890 | 1373988_1 | AA417099 AA435761 AA972917 AI660387 |
| 408776 | 106302_1 | BF057799 BE218747 T15720 AA057365 AI811370 |
| 414005 | 259333_1 | AW968220 AA259126 AA287352 AA279767 AI479143 AA863044 AA134489 H49266 L32048 |
| 412668 | 33230_1 | AK057749 AI701055 AA115476 AI633570 AI435607 AW173392 AI092468 AI989318 AA833891 AW295964 AI804107 AI767415 AI473818 |
| | | AI076758 AA278949 AA428547 N31385 H82560 AA464804 AA809073 AA832476 AW295298 BF108690 AI492243 N22394 AA487175 |
| | | AA431891 AW070941 AA278823 AA707840 AI346067 AI184307 AA936342 AI288633 AA425697 AI435960 AI301433 AA993394 AI917652 |
| | | AA487234 AA490964 AA937925 AI301378 AI783840 AI093652 AA723864 BF001378 BI818971 BI762256 AW957064 BG720359 BI821176 |
| | | BI906440 AI472868 AL523506 BF962934 BF960650 BI837618 BF956256 AA487349 BF961475 AA354431 AA115452 AA491157 N75632 |
| | | BF962141 AL562216 BI754640 N24091 R00062 AI963686 T56529 AU185624 T56460 H97658 BI752843 BI819132 AA210796 |
| 443547 | 137089_2 | AV645808 AA701657 AW271273 AI796734 AI472316 AI017531 AI061178 BF109096 AA548964 N83805 AAI31648 AA156589 BE708349 |
| | | AW952494 D30877 AV684717 Z24837 F00167 BF576150 T63841 R78995 N87474 |
| 421341 | 1407_1 | NM_007329 AF159456 AJ243212 AJ297935 AA295769 NM_017579 AJ243224 AI492875 AI796676 AI749838 AA918144 AI814590 |
| | | AI923531 BF513992 AI720725 AI150879 AI279072 AW612904 AI492104 AI284510 AI141231 AA613554 AW662148 AW769047 AA565985 |
| | | AW612888 AU100513 BG955585 BG955588 AA295763 BE829414 BF760645 BG954398 AA295332 AA295795 BE932867 AW769569 |
| | | T89953 BE934311 |
| 448425 | 506563_1 | AW005628 AI500359 AW275593 |
| 451742 | 15505_1 | BC017986 AI129314 BF594240 N80108 AI273593 AI292203 AI341883 AI093196 AI090550 AI144158 AW613047 AL043865 N78951 D44679 |
| | | BE349232 AW511871 AL537825 AL134066 F13505 AW954583 AA351161 T77609 BG283250 C15501 D81753 R60790 F04232 AL537824 |
| | | AI096710 AI307186 AA458658 AW614225 AI804466 BF446326 AI799735 BF591932 AW129277 AI252220 AI217036 AW316545 AI287987 |
| | | AI880082 H15099 N89711 AA054086 F26355 AI362724 N80775 Z39382 AI910523 T33415 R42392 AA455356 AA975079 AA894809 |
| | | T33395 F03344 BF726212 N53354 AA019494 AA311664 F10695 R41849 AA019744 AW299413 AI372486 AI384058 N98737 N64675 |
| | | AI953492 AI372484 R39245 W31177 BF679932 BF377203 BF977609 BI768322 BI764551 |
| 453143 | 10116_6 | BG542081 BF793365 AI371013 AI147536 AW005418 AA416767 AI083516 AI698032 AA410929 AI936116 AI079893 AA747741 BF940413 |
| | | BM007681 F12285 N75819 AI971415 AA032249 AW867908 AW867914 AI520867 BG990651 AA570507 AA036654 AA063585 AA873147 |
| | | AI538117 AA382234 T66232 BE272411 AA834031 BG122734 BI769788 W55850 AW879266 |

Pkey: Unique Eos probeset identifier number
CAT number: Gene cluster number
Accession: Genbank accession numbers

[0351] TABLE 5C

| Pkey | Ref | Strand | Nt_position |
|---|---|---|---|
| 403593 | 6862650 | Minus | 62554-62712, 69449-69602 |
| 404246 | 7406725 | Plus | 82477-82628, 82721-82817, |
| | | | 82910-83071, 8314 |
| 401929 | 3810670 | Minus | 3167-3286, 4216-4310 |
| 405443 | 7408143 | Plus | 90716-90887, 101420-101577 |
| 402575 | 9884830 | Minus | 109742-109883 |

Pkey: Unique number corresponding to an Eos probeset
Ref: Sequence source. The 7 digit numbers in this column are Genbank Identifier (GI) numbers. “Dunham I. et al.” refers to the publication entitled “The DNA sequence of human chromosome 22.” Dunham I. et al., Nature (1999) 402: 489-495.
Strand: Indicates DNA strand from which exons were predicted.
Nt_position: Indicates nucleotide positions of predicted exons.

[0352] TABLE 6A
About 1251 genes upregulated in lung metastases to the brain relative to normal lung

| Pkey | ExAccn | UniGeneID | UniGene Title | R1 | SEQ ID NO(s): |
|---|---|---|---|---|---|
| 406690 | M29540 | Hs.220529 | carcinoembryonic antigen-related cell ad | 55.34 | 4748 86 |
| 412719 | AW016610 | Hs.816 | ESTs | 31.39 | 663 |
| 422487 | AJ010901 | Hs.198267 | mucin 4, tracheobronchial | 29.00 | 1649 5152 |
| 409103 | AF251237 | Hs.112208 | XAGE-1 protein | 27.98 | 333 4812 |
| 444381 | BE387335 | Hs.283713 | hypothetical protein BC014245 | 27.21 | 3593 |
| 422963 | M79141 | Hs.13234 | sphingosine 1-phosphate phosphohydrolase | 26.63 | 1701 |
| 426682 | AV660038 | Hs.2056 | UDP glycosyltransferase 1 family, polype | 24.99 | 2086 |
| 414430 | AI346201 | Hs.76118 | ubiquitin carboxyl-terminal esterase L1 | 23.78 | 828 |
| 433447 | U29195 | Hs.3281 | neuronal pentraxin II | 23.05 | 2764 5536 |
| 429500 | X78565 | Hs.289114 | hexabrachion (tenascin C, cytotactin) | 21.72 | 2380 5410 |
| 411908 | L27943 | Hs.72924 | cytidine deaminase | 21.57 | 4869 585 |
| 409632 | W74001 | Hs.55279 | serine (or cysteine) proteinase inhibito | 20.87 | 390 |
| 431566 | AF176012 | Hs.260720 | J domain containing protein 1 | 19.92 | 2568 5479 |
| 425057 | AA826434 | Hs.1619 | achaete-scute complex (Drosophila) homol | 19.18 | 1915 |
| 456508 | AA502764 | Hs.123469 | ESTs, Weakly similar to AF208855 1 BM-01 | 19.04 | 4547 |
| 419078 | M93119 | Hs.89584 | insulinoma-associated 1 | 18.86 | 1272 5036 |
| 415906 | AI751357 | Hs.288741 | Homo sapiens cDNA: FLJ22256 fis, clone H | 18.81 | 959 |
| 419875 | AA853410 | Hs.93557 | proenkephalin | 18.39 | 1365 |
| 455601 | AI368680 | Hs.816 | SRY (sex determining region Y)-box 2 | 17.60 | 4515 |
| 428839 | AI767756 | Hs.82302 | Homo sapiens cDNA FLJ14814 fis, clone NT | 17.09 | 2310 |
| 439897 | NM_015310 | Hs.6763 | KIAA0942 protein | 17.06 | 3241 5600 |
| 417433 | BE270266 | Hs.82128 | 5T4 oncofetal trophoblast glycoprotein | 16.89 | 1094 |
| 449230 | BE613348 | | melanoma cell adhesion molecule | 16.73 | 4049 |
| 452838 | U65011 | Hs.30743 | preferentially expressed antigen in mela | 16.51 | 4353 5765 |
| 431958 | X63629 | Hs.2877 | cadherin 3, type 1, P-cadherin (placenta | 16.43 | 2621 5498 |
| 453857 | AL080235 | Hs.35861 | Ras-induced senescence 1 (RIS1) | 16.32 | 4437 5785 |
| 430130 | AL137311 | Hs.234074 | Homo sapiens mRNA; cDNA DKFZp761G02121 ( | 15.92 | 2445 5436 |
| 429228 | AI553633 | | hypothetical protein MGC33630 | 15.72 | 2340 |
| 424922 | BE386547 | Hs.217112 | hypothetical protein MGC10825 | 15.68 | 1900 |
| 447329 | BE090517 | | ESTs, Moderately similar to ALU8_HUMAN A | 15.67 | 3842 |
| 408393 | AW015318 | Hs.23165 | ESTs | 15.64 | 263 |
| 436217 | T53925 | Hs.107 | fibrinogen-like 1 | 15.60 | 2968 |
| 421948 | L42583 | Hs.334309 | keratin 6A | 15.17 | 1583 5130 |
| 452240 | AI591147 | Hs.61232 | ESTs | 15.02 | 4286 |
| 418738 | AW388633 | Hs.6682 | solute carrier family 7, (cationic amino | 14.89 | 1234 |
| 452487 | AW207659 | Hs.6630 | Homo sapiens cDNA FLJ13329 fis, clone OV | 14.82 | 4317 |
| 422440 | NM_004812 | Hs.116724 | aldo-keto reductase family 1, member B10 | 14.77 | 1647 5151 |
| 424001 | W67883 | Hs.137476 | paternally expressed 10 | 14.72 | 1788 |
| 408949 | AF189011 | Hs.49163 | putative ribonuclease III | 14.55 | 319 4809 |
| 431933 | AI187057 | Hs.132554 | ESTs | 14.54 | 2618 |
| 452747 | BE153855 | Hs.61460 | lg superfamily receptor LNIR | 14.48 | 4341 |
| 423634 | AW959908 | Hs.1690 | heparin-binding growth factor binding pr | 14.44 | 1762 |
| 432467 | T03667 | Hs.239388 | Human DNA sequence from clone RP1-304B14 | 14.36 | 2671 |
| 449722 | BE280074 | Hs.23960 | cyclin B1 | 14.29 | 4079 |
| 412490 | AW803564 | Hs.288850 | Homo sapiens cDNA: FLJ22528 fis, clone H | 14.27 | 637 |
| 406399 | | | NM_003122*:Homo sapiens serine protease | 14.16 | 4743 78 |
| 423073 | BE252922 | Hs.123119 | MAD (mothers against decapentaplegic, Dr | 13.94 | 1715 |
| 418329 | AW247430 | Hs.84152 | cystathionine-beta-synthase | 13.91 | 1186 |
| 428450 | NM_014791 | Hs.184339 | KIAA0175 gene product | 13.86 | 2259 5359 |
| 427871 | AW992405 | Hs.59622 | Homo sapiens, clone IMAGE:3507281, mRNA, | 13.56 | 2202 |
| 428342 | AI739168 | | Homo sapiens cDNA FLJ13458 fis, clone PL | 13.48 | 2244 |
| 426283 | NM_003937 | Hs.169139 | kynureninase (L-kynurenine hydrolase) | 13.45 | 2048 5297 |
| 411305 | BE241596 | Hs.69547 | myelin basic protein | 13.41 | 546 |
| 407137 | T97307 | | gb:ye53h05.s1 Soares fetal liver spleen | 13.41 | 128 |
| 410082 | AA081594 | Hs.158311 | Musashi (Drosophila) homolog 1 | 13.13 | 442 |
| 433485 | AI493076 | Hs.306098 | aldo-keto reductase family 1, member C2 | 13.09 | 2766 |
| 434826 | AF155661 | Hs.22265 | pyruvate dehydrogenase phosphatase | 13.05 | 2871 5556 |
| 425234 | AW152225 | Hs.165909 | ESTs, Weakly similar to I38022 hypotheti | 13.05 | 1940 |
| 437762 | T78028 | Hs.154679 | synaptotagmin I | 12.98 | 3088 |
| 427528 | AU077143 | Hs.179565 | minichromosome maintenance deficient (S. | 12.91 | 2161 |
| 426514 | BE616633 | Hs.170195 | bone morphogenetic protein 7 (osteogenic | 12.82 | 2073 |
| 424308 | AW975531 | Hs.154443 | minichromosome maintenance deficient (S. | 12.72 | 1827 |
| 416655 | AW968613 | Hs.79428 | BCL2/adenovirus E1B 19 kD-interacting pro | 12.61 | 1010 |
| 427344 | NM_000869 | Hs.2142 | 5-hydroxytryptamine (serotonin) receptor | 12.58 | 2145 5336 |
| 432441 | AW292425 | Hs.163484 | intron of hepatocyte nuclear factor-3 al | 12.57 | 2668 |
| 429170 | NM_001394 | Hs.2359 | dual specificity phosphatase 4 | 12.55 | 2336 5392 |
| 446080 | AI221741 | Hs.117777 | ESTs | 12.54 | 3723 |
| 414683 | S78296 | Hs.76888 | hypothetical protein MGC12702 | 12.54 | 4923 862 |
| 449845 | AW971183 | Hs.6019 | DnaJ (Hsp40) homolog, subfamily C, membe | 12.25 | 4088 |
| 410442 | X73424 | Hs.63788 | propionyl Coenzyme A carboxylase, beta p | 12.20 | 479 4848 |
| 422511 | AU076442 | Hs.117938 | collagen, type XVII, alpha 1 | 12.10 | 1650 |
| 442547 | AA306997 | Hs.217484 | ESTs, Weakly similar to ALU1_HUMAN ALU S | 11.92 | 3439 |
| 412446 | AI768015 | | ESTs | 11.86 | 633 |
| 414219 | W20010 | Hs.75823 | ALL1-fused gene from chromosome 1q | 11.78 | 804 |
| 414825 | X06370 | Hs.77432 | epidermal growth factor receptor (avian | 11.74 | 4930 882 |
| 422880 | AF228704 | Hs.193974 | glutathione reductase | 11.73 | 1689 5161 |
| 446469 | BE094848 | Hs.15113 | homogentisate 1,2-dioxygenase (homogenti | 11.65 | 3753 |
| 412636 | NM_004415 | | desmoplakin (DPI, DPII) | 11.63 | 4882 652 |
| 452099 | BE612992 | Hs.27931 | hypothetical protein FLJ10607 similar to | 11.54 | 4270 |
| 458692 | BE549905 | Hs.231754 | ESTs | 11.52 | 4633 |
| 431211 | M86849 | Hs.323733 | gap junction protein, beta 2, 26 kD (conn | 11.42 | 2540 5473 |
| 413554 | AA319146 | Hs.75426 | secretogranin II (chromogranin C) | 11.30 | 734 |
| 442432 | BE093589 | Hs.38178 | hypothetical protein FLJ23468 | 11.28 | 3429 |
| 429922 | Z97630 | Hs.226117 | H1 histone family, member 0 | 11.22 | 2427 5430 |
| 403149 | | | NM_001450:Homo sapiens four and a half L | 11.20 | 42 4711 |
| 424098 | AF077374 | Hs.139322 | small proline-rich protein 3 | 11.15 | 1804 5199 |
| 408298 | AI745325 | Hs.271923 | Homo sapiens cDNA: FLJ22785 fis, clone K | 11.13 | 253 |
| 426539 | AB011155 | Hs.170290 | discs, large (Drosophila) homolog 5 | 11.09 | 2076 5308 |
| 432460 | H12912 | Hs.274691 | adenylate kinase 3 | 11.06 | 2670 |
| 427398 | AW390020 | Hs.20415 | chromosome 21 open reading frame 11 | 11.02 | 2151 |
| 433339 | AF019226 | Hs.8036 | glioblastoma overexpressed | 10.98 | 2756 |
| 436420 | AA443966 | Hs.31595 | ESTs | 10.97 | 2984 |
| 412140 | AA219691 | Hs.73625 | RAB6 interacting, kinesin-like (rabkines | 10.97 | 613 |
| 434001 | AW950905 | Hs.3697 | angiotensinogen | 10.97 | 2804 |
| 409361 | NM_005982 | Hs.54416 | sine oculis homeobox (Drosophila) homolo | 10.94 | 364 4823 |
| 439963 | AW247529 | Hs.6793 | platelet-activating factor acetylhydrola | 10.87 | 3250 |
| 407833 | AW955632 | Hs.66666 | ESTs, Weakly similar to S 19560 proline-r | 10.84 | 204 |
| 433160 | AW207002 | Hs.134342 | TASP for testis-specific adriamycin sens | 10.78 | 2742 |
| 426827 | AW067805 | Hs.172665 | methylenetetrahydrofolate dehydrogenase | 10.64 | 2104 |
| 446342 | BE298665 | Hs.14846 | solute carrier family 7 (cationic amino | 10.58 | 3746 |
| 410337 | M83822 | Hs.62354 | cell division cycle 4-like | 10.58 | 465 4845 |
| 416854 | H40164 | Hs.80296 | Purkinje cell protein 4 | 10.58 | 1031 |
| 418327 | U70370 | Hs.84136 | paired-like homeodomain transcription fa | 10.55 | 1185 5009 |
| 425071 | NM_013989 | Hs.154424 | deiodinase, iodothyronine, type II | 10.53 | 1916 5244 |
| 409041 | AB033025 | Hs.50081 | Hypothetical protein, XP_051860 (KIAA119 | 10.52 | 327 4811 |
| 436291 | BE568452 | Hs.344037 | protein regulator of cytokinesis 1 | 10.50 | 2975 |
| 446639 | AI016826 | Hs.342148 | ESTs | 10.48 | 3774 |
| 421110 | AJ250717 | Hs.1355 | cathepsin E | 10.47 | 1481 5094 |
| 417308 | H60720 | Hs.81892 | KIAA0101 gene product | 10.47 | 1079 |
| 428931 | AA994979 | Hs.98967 | ATPase, H()-transporting, lysosomal, non | 10.46 | 2317 |
| 425465 | L18964 | Hs.1904 | protein kinase C, iota | 10.42 | 1969 5266 |
| 423472 | AF041260 | Hs.129057 | breast carcinoma amplified sequence 1 | 10.40 | 1749 5181 |
| 433001 | AF217513 | Hs.279905 | clone HQ0310 PRO0310p1 | 10.39 | 2719 5521 |
| 429663 | M68874 | Hs.211587 | phospholipase A2, group IVA (cytosolic, | 10.36 | 2404 5422 |
| 424378 | W28020 | Hs.167988 | neural cell adhesion molecule 1 | 10.33 | 1837 |
| 447033 | AI357412 | Hs.157601 | Predicted gene: Eos cloned; secreted w/V | 10.29 | 3814 |
| 413517 | N76712 | Hs.44829 | ESTs, Weakly similar to I38022 hypotheti | 10.27 | 730 |
| 422163 | AF027208 | Hs.112360 | prominin (mouse)-like 1 | 10.22 | 1611 5140 |
| 436469 | AK001455 | Hs.5198 | Down syndrome critical region gene 2 | 10.21 | 2986 |
| 409187 | AF154830 | Hs.50966 | carbamoyl-phosphate synthetase 1, mitoch | 10.21 | 347 4816 |
| 428966 | AF059214 | Hs.194687 | cholesterol 25-hydroxylase | 10.20 | 2320 5385 |
| 443683 | BE241717 | Hs.9676 | uncharacterized hypothalamus protein HT0 | 10.16 | 3539 |
| 426793 | X89887 | Hs.172350 | HIR (histone cell cycle regulation defec | 10.13 | 2100 5321 |
| 409269 | AA576953 | Hs.22972 | steroid 5 alpha-reductase 2-like; H5AR g | 10.09 | 358 |
| 428862 | NM_000346 | Hs.2316 | SRY (sex determining region Y)-box 9 (ca | 10.05 | 2313 5382 |
| 414869 | AA157291 | Hs.21479 | ubinuclein 1 | 9.98 | 885 |
| 407633 | NM_007069 | Hs.37189 | similar to rat HREV107 | 9.97 | 173 4776 |
| 410817 | AI262789 | Hs.93659 | protein disulfide isomerase related prot | 9.95 | 515 |
| 442355 | AA456539 | Hs.8262 | lysosomal-associated membrane protein 2 | 9.91 | 3424 |
| 448474 | AI792014 | Hs.13809 | hypothetical protein FLJ10648 | 9.87 | 3972 |
| 430589 | AJ002744 | Hs.246315 | UDP-N-acetyl-alpha-D-galactosamine:polyp | 9.84 | 2497 5457 |
| 456844 | AI264155 | Hs.152981 | CDP-diacylglycerol synthase (phosphatida | 9.83 | 4562 |
| 425322 | U63630 | Hs.155637 | protein kinase, DNA-activated, catalytic | 9.83 | 1950 5255 |
| 416294 | D86980 | Hs.79170 | KIAA0227 protein | 9.81 | 4958 984 |
| 446204 | AI279809 | Hs.150019 | ESTs | 9.77 | 3735 |
| 424954 | NM_000546 | Hs.1846 | tumor protein p53 (Li-Fraumeni syndrome) | 9.75 | 1901 5238 |
| 426559 | AB001914 | Hs.170414 | paired basic amino acid cleaving system | 9.73 | 2078 5309 |
| 441020 | W79283 | Hs.35962 | ESTs | 9.68 | 3325 |
| 431797 | BE169641 | Hs.270134 | hypothetical protein FLJ20280 | 9.66 | 2601 |
| 407355 | AA846203 | Hs.193974 | ESTs, Weakly similar to ALU1_HUMAN ALU S | 9.66 | 155 |
| 446839 | BE091926 | Hs.16244 | mitotic spindle coiled-coil related prof | 9.65 | 3794 |
| 434063 | AA018893 | Hs.3727 | unr-interacting protein | 9.63 | 2811 |
| 432886 | BE159028 | Hs.279704 | chromatin accessibility complex 1 | 9.57 | 2708 |
| 449349 | AI825386 | | hypothetical protein FLJ21939 similar to | 9.56 | 4057 |
| 453884 | AA355925 | Hs.36232 | KIAA0186 gene product | 9.54 | 4444 |
| 412519 | AA196241 | Hs.73980 | troponin T1, skeletal, slow | 9.53 | 641 |
| 428004 | AA449563 | Hs.151393 | glutamate-cysteine ligase, catalytic sub | 9.51 | 2213 |
| 440274 | R24595 | Hs.7122 | scrapie responsive protein 1 | 9.49 | 3275 |
| 423732 | AF058056 | Hs.132183 | solute carrier family 16 (monocarboxylic | 9.46 | 1770 5185 |
| 427674 | NM_003528 | Hs.2178 | H2B histone family, member Q | 9.43 | 2177 5342 |
| 441633 | AW958544 | Hs.112242 | normal mucosa of esophagus specific 1 | 9.42 | 3363 |
| 413753 | U17760 | Hs.75517 | laminin, beta 3 (nicein (125 kD), kalinin | 9.41 | 4906 750 |
| 452046 | AB018345 | Hs.27657 | KIAA0802 protein | 9.41 | 4266 5754 |
| 434061 | AW024973 | Hs.283675 | NPD009 protein | 9.40 | 2810 |
| 424572 | M19650 | Hs.179600 | 2′,3′-cyclic nucleotide 3′ phosphodieste | 9.40 | 1859 5218 |
| 435937 | AA830893 | Hs.119769 | ESTs | 9.35 | 2953 |
| 447818 | W79940 | Hs.21906 | Homo sapiens clone 24670 mRNA sequence | 9.34 | 3909 |
| 431374 | BE258532 | Hs.251871 | CTP synthase | 9.31 | 2551 |
| 431183 | NM_006855 | Hs.250696 | KDEL (Lys-Asp-Glu-Leu) endoplasmic retic | 9.30 | 2537 5472 |
| 421535 | AB002359 | Hs.105478 | phosphoribosylformylglycinamidine syntha | 9.28 | 1535 5115 |
| 407896 | D76435 | Hs.41154 | Zic family member 1 (odd-paired Drosophi | 9.28 | 213 4785 |
| 443715 | AI583187 | Hs.9700 | cyclin E1 | 9.26 | 3544 |
| 431726 | NM_015361 | Hs.268053 | KIAA0029 protein | 9.26 | 2592 5489 |
| 451807 | W52854 | | hypothetical protein FLJ23293 similar to | 9.23 | 4249 |
| 438461 | AW075485 | Hs.286049 | phosphoserine aminotransferase | 9.20 | 3141 |
| 435854 | AJ278120 | Hs.4996 | putative ankyrin-repeat containing prote | 9.19 | 2949 5571 |
| 408437 | AW957744 | Hs.278469 | lacrimal proline rich protein | 9.18 | 267 |
| 452576 | AB023177 | Hs.29900 | KIAA0960 protein | 9.11 | 4327 5760 |
| 450447 | AF212223 | Hs.25010 | hypothetical protein P15-2 | 9.08 | 4139 5730 |
| 427051 | BE178110 | Hs.173374 | Homo sapiens cDNA FLJ10500 fis, clone NT | 9.06 | 2123 |
| 414368 | W70171 | Hs.75939 | uridine monophosphate kinase | 9.06 | 818 |
| 446945 | AI193115 | Hs.16611 | tumor protein D52-like 1 | 9.05 | 3805 |
| 446873 | AI554439 | | ESTs | 9.01 | 3797 |
| 450377 | AB033091 | | KIAA1265 protein | 9.00 | 4134 5729 |
| 431707 | R21326 | Hs.267905 | hypothetical protein FLJ10422 | 9.00 | 2587 |
| 417733 | AL048678 | Hs.82503 | H. sapiens mRNA for 3'UTR of unknown prot | 8.94 | 1119 |
| 428987 | NM_004751 | Hs.194710 | glucosaminyl (N-acetyl) transferase 3, m | 8.93 | 2324 5386 |
| 433212 | BE218049 | Hs.121820 | ESTs | 8.93 | 2749 |
| 448520 | AB002367 | Hs.21355 | doublecortin and CaM kinase-like 1 | 8.91 | 3980 5710 |
| 424800 | AL035588 | Hs.153203 | MyoD family inhibitor | 8.90 | 1888 5232 |
| 451752 | AB032997 | | KIAA1171 protein | 8.87 | 4247 5750 |
| 401197 | | | ENSP00000229263*: HSPC213. | 8.79 | |
| 442772 | AW503680 | Hs.5957 | Homo sapiens clone 24416 mRNA sequence | 8.79 | 3468 |
| 411800 | N39342 | Hs.103042 | microtubule-associated protein 1B | 8.79 | 579 |
| 429973 | AI423317 | Hs.164680 | ESTs | 8.75 | 2432 |
| 450937 | R49131 | Hs.26267 | ATP-dependant interferon response protei | 8.72 | 4177 |
| 418721 | NM_002731 | Hs.87773 | protein kinase, cAMP-dependent, catalyti | 8.72 | 1231 5027 |
| 400247 | | | Eos Control | 8.71 | |
| 420153 | N22120 | Hs.75277 | hypothetical protein FLJ13910 | 8.68 | 1389 |
| 436895 | AF037335 | Hs.5338 | carbonic anhydrase XII | 8.68 | 3019 5582 |
| 457465 | AW301344 | Hs.122908 | DNA replication factor | 8.67 | 4592 |
| 441031 | AI110684 | Hs.7645 | fibrinogen, B beta polypeptide | 8.61 | 3329 |
| 419239 | AA468183 | Hs.184598 | Homo sapiens cDNA: FLJ23241 fis, clone C | 8.60 | 1292 |
| 427982 | NM_016156 | Hs.181326 | KIAA1073 protein | 8.60 | 2210 5349 |
| 415914 | AA306033 | Hs.78915 | GA-binding protein transcription factor, | 8.60 | 960 |
| 422656 | AI870435 | Hs.1569 | LIM homeobox protein 2 | 8.53 | 1668 |
| 443247 | BE614387 | Hs.333893 | c-Myc target JPO1 | 8.51 | 3513 |
| 410102 | AW248508 | Hs.279727 | ESTs; homologue of PEM-3 [Ciona savignyi | 8.50 | 446 |
| 401451 | | | NM_004496*:Homo sapiens hepatocyte nucle | 8.50 | 27 4697 |
| 441680 | AW444598 | Hs.7940 | RAP1, GTP-GDP dissociation stimulator 1 | 8.48 | 3368 |
| 452367 | U71207 | Hs.29279 | eyes absent (Drosophila) homolog 2 | 8.48 | 4300 5757 |
| 444172 | BE147740 | | ESTs, Moderately similar I38022 hypot | 8.48 | 3580 |
| 414883 | AA926960 | | CDC28 protein kinase 1 | 8.47 | 887 |
| 412652 | AI801777 | | ESTs | 8.46 | 655 |
| 426788 | U66615 | Hs.172280 | SWI/SNF related, matrix associated, acti | 8.45 | 2099 5320 |
| 418827 | BE327311 | Hs.47166 | HT021 | 8.40 | 1245 |
| 415138 | C18356 | Hs.295944 | tissue factor pathway inhibitor 2 | 8.39 | 910 |
| 453507 | AF083217 | Hs.33085 | WD repeat domain 3 | 8.36 | 4414 5778 |
| 407944 | R34008 | Hs.239727 | desmocollin 2 | 8.34 | 218 |
| 407168 | R45175 | Hs.117183 | ESTs | 8.33 | 131 |
| 419631 | AW188117 | | popeye protein 3 | 8.31 | 1340 |
| 416000 | R82342 | Hs.79856 | ESTs, Weakly similar to S65657 alpha-1C- | 8.29 | 965 |
| 442426 | AI373062 | Hs.332938 | hypothetical protein MGC5370 | 8.29 | 3427 |
| 409977 | AW805510 | Hs.97056 | hypothetical protein FLJ21634 | 8.27 | 424 |
| 412482 | AI499930 | Hs.334885 | mitochondrial GTP binding protein | 8.24 | 636 |
| 429597 | NM_003816 | Hs.2442 | a disintegrin and metalloproteinase doma | 8.23 | 2392 5412 |
| 428340 | AF261088 | Hs.154721 | aconitase 1, soluble | 8.22 | 2243 5355 |
| 436557 | W15573 | Hs.5027 | ESTs, Weakly similar to A47582 B-cell gr | 8.20 | 2993 |
| 416602 | NM_006159 | Hs.79389 | Protein kinase C-binding protein NELL2 | 8.14 | 1006 4965 |
| 421305 | BE397354 | Hs.324830 | diptheria toxin resistance protein requi | 8.14 | 1505 |
| 453439 | AI572438 | Hs.32976 | guanine nucleotide binding protein 4 | 8.14 | 4406 |
| 414761 | AU077228 | Hs.77256 | enhancer of zeste (Drosophila) homolog 2 | 8.12 | 875 |
| 441362 | BE614410 | Hs.23044 | RAD51 (S. cerevisiae) homolog (E coil Re | 8.12 | 3347 |
| 439924 | AI985897 | Hs.125293 | ESTs | 8.11 | 3242 |
| 408576 | NM_003542 | Hs.46423 | H4 histone family, member G | 8.10 | 280 4800 |
| 429343 | AK000785 | Hs.199480 | Homo sapiens, Similar to epsin 3, clone | 8.10 | 2356 5402 |
| 417720 | AA205625 | Hs.208067 | ESTs | 8.08 | 1116 |
| 426167 | AF039023 | Hs.167496 | RAN binding protein 6 | 8.06 | 2034 5295 |
| 432426 | AW973152 | Hs.31050 | ESTs | 8.06 | 2666 |
| 422956 | BE545072 | Hs.122579 | ECT2 protein (Epithelial cell transformi | 8.05 | 1698 |
| 415927 | AL120168 | Hs.78919 | Kell blood group precursor (McLeod pheno | 8.03 | 961 |
| 400409 | AF153341 | | Homo sapiens winged helix/forkhead trans | 8.02 | 15 4687 |
| 419743 | AW408762 | Hs.5957 | Homo sapiens clone 24416 mRNA sequence | 8.02 | 1356 |
| 430937 | X53463 | Hs.2704 | glutathione peroxidase 2 (gastrointestin | 8.01 | 2522 5466 |
| 417576 | AA339449 | Hs.82285 | phosphoribosylglycinamide formyltransfer | 8.01 | 1102 |
| 433980 | AA137152 | Hs.286049 | phosphoserine aminotransferase | 8.00 | 2803 |
| 405770 | | | NM_002362:Homo sapiens melanoma antigen, | 8.00 | 4740 74 |
| 434423 | NM_006769 | Hs.3844 | LIM domain only 4 | 8.00 | 2839 5548 |
| 447414 | D82343 | Hs.74376 | neuroblastoma (nerve tissue) protein | 7.99 | 3859 5687 |
| 407748 | AL079409 | Hs.38176 | KIAA0606 protein; SCN Circadian Oscillat | 7.99 | 188 |
| 422150 | AI867118 | | calpastatin | 7.98 | 1609 |
| 417333 | AL157545 | Hs.173179 | bromodomain and PHD finger containing, 3 | 7.97 | 1081 |
| 416391 | AI878927 | Hs.79284 | mesoderm specific transcript (mouse) hom | 7.94 | 992 |
| 418304 | AA215702 | | gb:zr97g10.rl NCl_CGAP_GCB1 Homo sapiens | 7.91 | 1178 |
| 430066 | AI929659 | Hs.237825 | signal recognition particle 72 kD | 7.90 | 2442 |
| 433862 | D86960 | Hs.3610 | KIAA0205 gene product | 7.84 | 2793 5542 |
| 430304 | AL122071 | Hs.238927 | Homo sapiens mRNA; cDNA DKFZp434H1235 (f | 7.81 | 2467 5442 |
| 446525 | AW967069 | Hs.211556 | hypothetical protein MGC5487 | 7.80 | 3758 |
| 414217 | AI309298 | Hs.279898 | Homo sapiens cDNA: FLJ23165 fis, clone L | 7.78 | 803 |
| 438549 | BE386801 | Hs.21858 | trinucleotide repeat containing 3 | 7.78 | 3147 |
| 457211 | AW972565 | Hs.32399 | ESTs, Weakly similar to S51797 vasodilat | 7.77 | 4583 |
| 413437 | BE313164 | Hs.75361 | gene from NF2/meningioma region of 22q12 | 7.77 | 722 |
| 418164 | AI761820 | Hs.41074 | ESTs, Weakly similar to I39294 McLeod sy | 7.76 | 1165 |
| 448826 | AI580252 | Hs.293246 | ESTs, Weakly similar to putative p150 [H | 7.74 | 4012 |
| 437271 | AL137445 | Hs.28846 | Homo sapiens mRNA; cDNA DKFZp566O134 (fr | 7.71 | 3052 |
| 450325 | AI935962 | Hs.91973 | ESTs | 7.69 | 4129 |
| 429276 | AF056085 | Hs.198612 | G protein-coupled receptor 51 | 7.67 | 2346 5397 |
| 433201 | AB040896 | Hs.21104 | KIAA1463 protein | 7.66 | 2747 5532 |
| 420309 | AW043637 | Hs.21766 | ESTs, Weakly similar to ALU5_HUMAN ALU S | 7.66 | 1408 |
| 427581 | NM_014788 | Hs.179703 | KIAA0129 gene product | 7.65 | 2167 5339 |
| 424834 | AK001432 | Hs.153408 | Homo sapiens cDNA FLJ10570 fis, clone NT | 7.65 | 1889 |
| 447342 | AI199268 | Hs.19322 | Homo sapiens, Similar to RIKEN cDNA 2010 | 7.65 | 3845 |
| 416783 | AA206186 | Hs.79889 | monocyte to macrophage differentiation-a | 7.64 | 1022 |
| 420039 | NM_004605 | Hs.94581 | sulfotransferase family, cytosolic, 2B, | 7.63 | 1377 5061 |
| 442332 | AI693251 | Hs.8248 | Target CAT | 7.63 | 3421 |
| 439941 | AI392640 | Hs.18272 | amino acid transporter system A1 | 7.63 | 3246 |
| 451061 | AW291487 | Hs.213659 | ESTs, Weakly similar to KIAA1357 protein | 7.62 | 4186 |
| 409757 | NM_001898 | Hs.123114 | cystatin SN | 7.62 | 403 4832 |
| 438523 | H66220 | Hs.278177 | ESTs | 7.61 | 3144 |
| 444670 | H58373 | Hs.332938 | hypothetical protein MGC5370 | 7.61 | 3618 |
| 446771 | AA128965 | Hs.60679 | TATA box binding protein (TBP)-associate | 7.61 | 3783 |
| 427944 | AA417878 | Hs.48401 | ESTs, Moderately similar to ALU8_HUMAN A | 7.60 | 2205 |
| 447343 | AA256641 | Hs.236894 | ESTs, Highly similar to S02392 alpha-2-m | 7.59 | 3846 |
| 418113 | AI272141 | Hs.83484 | SRY (sex determining region Y)-box 4 | 7.58 | 1161 |
| 407788 | BE514982 | Hs.38991 | S100 calcium-binding protein A2 | 7.57 | 195 |
| 408452 | AA054683 | Hs.192455 | ESTs, Weakly similar to ALU7_HUMAN ALU S | 7.54 | 268 |
| 428648 | AF052728 | Hs.188021 | potassium voltage-gated channel, subfami | 7.54 | 2279 5369 |
| 448209 | AW160489 | Hs.20709 | tetraspan 5 | 7.53 | 3951 |
| 432415 | T16971 | Hs.289014 | ESTs, Weakly similar to A43932 mucin 2 p | 7.53 | 2665 |
| 430294 | AI538226 | Hs.32976 | guanine nucleotide binding protein 4 | 7.50 | 2463 |
| 440700 | AW952281 | Hs.296184 | guanine nucleotide binding protein (G pr | 7.49 | 3313 |
| 425842 | AI587490 | Hs.159623 | NK-2 (Drosophila) homolog B | 7.47 | 2002 |
| 409799 | D11928 | Hs.76845 | phosphoserine phosphatase-like | 7.46 | 407 |
| 408524 | D87942 | Hs.46328 | fucosyltransferase 2 (secretor status in | 7.42 | 275 4799 |
| 433730 | AK002135 | Hs.3542 | hypothetical protein FLJ11273 | 7.41 | 2783 5540 |
| 444783 | AK001468 | Hs.62180 | anillin (Drosophila Scraps homolog), act | 7.39 | 3628 5645 |
| 450378 | AW249181 | Hs.198899 | ESTs, Weakly similar to T19873 hypotheti | 7.39 | 4135 |
| 452721 | AJ269529 | Hs.301871 | solute carrier family 37 (glycerol-3-pho | 7.39 | 4337 5761 |
| 422283 | AW411307 | Hs.114311 | CDC45 (cell division cycle 45, S.cerevis | 7.38 | 1626 |
| 409974 | BE174106 | Hs.225641 | hypothetical protein FLJ13171 | 7.38 | 423 |
| 426779 | AA384577 | Hs.93714 | ESTs, Weakly similar to T00365 hypotheti | 7.38 | 2097 |
| 424602 | AK002055 | Hs.151046 | hypothetical protein FLJ11193 | 7.36 | 1863 5219 |
| 431789 | H19500 | Hs.269222 | mitogen-activated protein kinase 4 | 7.36 | 2599 |
| 435538 | AB011540 | Hs.4930 | low density lipoprotein receptor-related | 7.35 | 2924 5565 |
| 437810 | BE246399 | | hypothetical protein | 7.35 | 3093 |
| 425843 | BE313280 | Hs.159627 | death associated protein 3 | 7.34 | 2003 |
| 424544 | M88700 | Hs.150403 | dopa decarboxylase (aromatic L-amino aci | 7.33 | 1858 5217 |
| 416426 | AA180256 | Hs.210473 | Homo sapiens cDNA FLJ14872 fis, clone PL | 7.32 | 996 |
| 412715 | NM_000947 | Hs.74519 | primase, polypeptide 2A (58 kD) | 7.32 | 4885 662 |
| 420552 | AK000492 | Hs.98806 | hypothetical protein | 7.29 | 1430 5081 |
| 409509 | AL036923 | Hs.322710 | ESTs | 7.29 | 379 |
| 439708 | AI761369 | Hs.59584 | hypothetical protein FLJ21144 | 7.29 | 3231 |
| 420281 | AI623693 | Hs.323494 | Predicted cation efflux pump | 7.29 | 1405 |
| 406972 | M32053 | | gb:Human H19 RNA gene, complete cds. | 7.28 | 115 |
| 446595 | T57448 | Hs.15467 | hypothetical protein FLJ20725 | 7.27 | 3768 |
| 412942 | AL120344 | Hs.75074 | mitogen-activated protein kinase-activat | 7.27 | 685 |
| 445098 | AL050272 | Hs.12305 | DKFZP566B183 protein | 7.26 | 3651 5651 |
| 446006 | NM_004403 | Hs.13530 | deafness, autosomal dominant 5 | 7.24 | 3717 5662 |
| 412935 | BE267045 | Hs.75064 | tubulin-specific chaperone c | 7.23 | 683 |
| 432103 | T15803 | Hs.272458 | protein phosphatase 3 (formerly 2B), cat | 7.22 | 2631 |
| 446619 | AU076643 | Hs.313 | secreted phosphoprotein 1 (osteopontin, | 7.20 | 3770 |
| 436009 | H57130 | Hs.120925 | ESTs | 7.20 | 2955 |
| 445413 | AA151342 | Hs.12677 | CGI-147 protein | 7.20 | 3675 |
| 417454 | NM_000202 | Hs.172458 | iduronate 2-sulfatase (Hunter syndrome) | 7.19 | 1097 4986 |
| 442445 | AA082665 | Hs.209561 | KIAA1715 protein | 7.18 | 3431 |
| 411975 | AI916058 | Hs.144583 | 3′UTR of: dead ringer (Drosophila)-like | 7.18 | 596 |
| 426501 | AW043782 | Hs.293616 | ESTs | 7.18 | 2072 |
| 426759 | AI590401 | Hs.21213 | ESTs | 7.17 | 2094 |
| 447644 | AW861622 | Hs.108646 | Homo sapiens cDNA FLJ14934 fis, clone PL | 7.16 | 3886 |
| 413654 | AA331881 | Hs.75454 | peroxiredoxin 3 | 7.16 | 745 |
| 445893 | AI610702 | Hs.202613 | ESTs, Weakly similar to TRHY_HUMAN TRICH | 7.12 | 3710 |
| 407252 | AA659037 | Hs.163780 | ESTs | 7.12 | 146 |
| 423242 | AL039402 | Hs.125783 | DEME-6 protein | 7.08 | 1730 |
| 426471 | M22440 | Hs.170009 | transforming growth factor, alpha | 7.08 | 2068 5305 |
| 418027 | AB037807 | Hs.83293 | hypothetical protein | 7.05 | 1149 5000 |
| 448497 | BE613269 | Hs.21893 | hypothetical protein DKFZp761N0624 | 7.05 | 3977 |
| 446636 | AC002563 | Hs.15767 | citron (rho-interacting, serine/threonin | 7.03 | 3773 5674 |
| 416498 | U33632 | Hs.79351 | potassium channel, subfamily K, member 1 | 7.02 | 4962 999 |
| 412452 | AA215731 | | suppression of tumorigenicity 5 | 7.02 | 634 |
| 413281 | AA861271 | Hs.222024 | transcription factor BMAL2 | 6.99 | 706 |
| 434540 | NM_016045 | Hs.3945 | CGI-107 protein | 6.98 | 2847 5549 |
| 445994 | NM_004724 | Hs.13512 | ZW10 (Drosophila) homolog, centromere/ki | 6.98 | 3716 5661 |
| 416815 | U41514 | Hs.80120 | UDP-N-acetyl-alpha-D-galactosamine:polyp | 6.97 | 1027 4968 |
| 418338 | NM_002522 | Hs.84154 | neuronal pentraxin I | 6.97 | 1189 5010 |
| 436389 | AI811706 | Hs.42733 | CHMP1.5 protein | 6.94 | 2981 |
| 418203 | X54942 | Hs.83758 | CDC28 protein kinase 2 | 6.93 | 1169 5003 |
| 418863 | AL135743 | Hs.25566 | ESTs, Weakly similar to 2004399A chromos | 6.93 | 1251 |
| 413551 | BE242639 | Hs.75425 | ubiquitin associated protein | 6.93 | 733 |
| 424505 | AA446131 | Hs.124918 | KIAA1795 protein | 6.92 | 1853 |
| 426359 | AA376409 | Hs.10862 | Homo sapiens cDNA: FLJ23313 fis, clone H | 6.91 | 2059 |
| 423453 | AW450737 | Hs.128791 | CGI-09 protein | 6.91 | 1748 |
| 450256 | AA286887 | Hs.24724 | MFH-amplified sequences with leucine-ric | 6.91 | 4120 |
| 443119 | AA312264 | Hs.7980 | hypothetical protein MGC12966 | 6.90 | 3498 |
| 410268 | AA316181 | Hs.61635 | six transmembrane epithelial antigen of | 6.90 | 461 |
| 406850 | AI624300 | Hs.172928 | collagen, type I, alpha 1 | 6.90 | 104 |
| 409619 | AK001015 | Hs.55220 | BCL2-associated athanogene 2 | 6.88 | 388 |
| 424381 | AA285249 | Hs.146329 | protein kinase Chk2 (CHEK2) | 6.86 | 1838 |
| 431548 | AI834273 | Hs.9711 | novel protein | 6.84 | 2564 |
| 409420 | Z15008 | Hs.54451 | laminin, gamma 2 (nicein (100 kD), kalini | 6.84 | 368 4824 |
| 453454 | AW052006 | | PRP4/STK/WD splicing factor | 6.83 | 4407 |
| 407807 | AL031427 | Hs.40094 | Human DNA sequence from clone 167A19 on | 6.82 | 198 |
| 445863 | R12234 | Hs.13396 | Homo sapiens clone 25028 mRNA sequence | 6.80 | 3703 |
| 442069 | AW664144 | Hs.297007 | membrane-bound transcription factor prot | 6.78 | 3393 |
| 428771 | AB028992 | Hs.193143 | KIAA1069 protein | 6.78 | 2295 5375 |
| 426141 | C05886 | Hs.293972 | ESTs | 6.77 | 2031 |
| 445817 | NM_003642 | Hs.13340 | histone acetyltransferase 1 | 6.77 | 3700 5659 |
| 408249 | AW271838 | Hs.44038 | pellino (Drosophila) homolog 2 | 6.76 | 249 |
| 438209 | AL120659 | Hs.6111 | aryl-hydrocarbon receptor nuclear transl | 6.75 | 3126 |
| 420164 | AW339037 | Hs.24908 | ESTs | 6.75 | 1390 |
| 417821 | BE245149 | Hs.82643 | protein tyrosine kinase 9 | 6.74 | 1126 |
| 432978 | AF126743 | Hs.279884 | DNAJ domain-containing | 6.73 | 2717 5520 |
| 428484 | AF104032 | Hs.184601 | solute carrier family 7 (cationic amino | 6.73 | 2265 5364 |
| 433409 | AI278802 | Hs.25661 | ESTs | 6.73 | 2761 |
| 427286 | AW732802 | Hs.2132 | epidermal growth factor receptor pathway | 6.72 | 2138 |
| 431770 | BE221880 | Hs.268555 | 5′-3′ exoribonuclease 2 | 6.72 | 2596 |
| 407635 | AW370213 | Hs.295232 | ESTs, Moderately similar to A46010 X-lin | 6.72 | 175 |
| 410240 | AL157424 | Hs.61289 | synaptojanin 2 | 6.72 | 459 |
| 401519 | | | C15000476*:gi\|12737279\|ref\|XP_012163.1\| | 6.71 | |
| 409557 | BE182896 | Hs.3686 | ESTs | 6.71 | 384 |
| 445800 | AA126419 | Hs.32944 | inositol polyphosphate-4-phosphatase, ty | 6.70 | 3699 |
| 415947 | U04045 | Hs.78934 | mutS (E. coli) homolog 2 (colon cancer, | 6.70 | 4955 962 |
| 426125 | X87241 | Hs.166994 | FAT tumor suppressor (Drosophila) homolo | 6.70 | 2029 5292 |
| 451418 | BE387790 | Hs.26369 | hypothetical protein FLJ20287 | 6.69 | 4221 |
| 428698 | AA852773 | Hs.334838 | KIAA1866 protein | 6.68 | 2283 |
| 429903 | AL134197 | Hs.93597 | cyclin-dependent kinase 5, regulatory su | 6.68 | 2425 |
| 433437 | U20536 | Hs.3280 | caspase 6, apoptosis-related cysteine pr | 6.66 | 2762 5535 |
| 411945 | AL033527 | Hs.92137 | L-myc-2 protein (MYCL2) | 6.65 | 4870 590 |
| 424140 | Z48051 | Hs.141308 | myelin oligodendrocyte glycoprotein | 6.65 | 1809 5200 |
| 413010 | AA393273 | Hs.75133 | transcription factor 6-like 1 (mitochond | 6.63 | 689 |
| 438915 | AA280174 | Hs.285681 | Williams-Beuren syndrome chromosome regi | 6.63 | 3178 |
| 410619 | BE512730 | Hs.65114 | keratin 18 | 6.62 | 498 |
| 410174 | AA306007 | Hs.59461 | DKFZP434C245 protein | 6.62 | 453 |
| 423250 | BE061916 | Hs.125849 | chromosome 8 open reading frame 2 | 6.62 | 1732 |
| 409542 | AA503020 | Hs.36563 | hypothetical protein FLJ22418 | 6.61 | 382 |
| 448664 | AI879317 | Hs.334691 | splicing factor 3a, subunit 1, 120 kD | 6.61 | 3994 |
| 429332 | AF030403 | Hs.199263 | Ste-20 related kinase | 6.61 | 2355 5401 |
| 421778 | AA428000 | Hs.283072 | actin related protein 2/3 complex, subun | 6.60 | 1563 |
| 450800 | BE395161 | Hs.1390 | proteasome (prosome, macropain) subunit, | 6.57 | 4167 |
| 433556 | W56321 | Hs.111460 | calcium/calmodulin-dependent protein kin | 6.55 | 2768 |
| 434263 | N34895 | Hs.79187 | ESTs | 6.54 | 2825 |
| 422967 | AL117526 | Hs.118164 | hypothetical protein FLJ12383 | 6.54 | 1703 5164 |
| 429183 | AB014604 | Hs.197955 | KIAA0704 protein | 6.53 | 2337 5393 |
| 428753 | AW939252 | Hs.192927 | hypothetical protein FLJ20251 | 6.53 | 2291 |
| 443991 | NM_002250 | Hs.10082 | potassium intermediate/small conductance | 6.53 | 3566 5632 |
| 442092 | AW578669 | | hypothetical protein FLJ12439 | 6.52 | 3397 |
| 442013 | AA506476 | Hs.82689 | Human DNA sequence from clone RP11-353C1 | 6.51 | 3388 |
| 414706 | AW340125 | Hs.76989 | KIAA0097 gene product | 6.51 | 865 |
| 434629 | AA789081 | Hs.4029 | glioma-amplified sequence-41 | 6.50 | 2854 |
| 452259 | AA317439 | Hs.28707 | signal sequence receptor, gamma (translo | 6.50 | 4290 |
| 428471 | X57348 | Hs.184510 | stratifin | 6.49 | 2262 5361 |
| 407378 | AA299264 | Hs.57776 | ESTs, Moderately similar to I38022 hypot | 6.49 | 160 |
| 416221 | BE513171 | Hs.79086 | mitochondrial ribosomal protein L3 | 6.49 | 982 |
| 426716 | NM_006379 | Hs.171921 | sema domain, immunoglobulin domain (Ig), | 6.47 | 2090 5315 |
| 442315 | AA173992 | Hs.7956 | ESTs, Moderately similar to ZN91_HUMAN Z | 6.47 | 3414 |
| 442571 | C06338 | Hs.165464 | ESTs | 6.46 | 3444 |
| 415156 | X84908 | Hs.78060 | phosphorylase kinase, beta | 6.45 | 4940 911 |
| 443180 | R15875 | Hs.258576 | claudin 12 | 6.45 | 3504 |
| 429413 | NM_014058 | Hs.201877 | DESC1 protein | 6.43 | 2366 5405 |
| 417348 | AI940507 | Hs.318526 | hypothetical protein FLJ12661 | 6.43 | 1084 |
| 407235 | D20569 | Hs.169407 | SAC2 (suppressor of actin mutations 2, y | 6.43 | 140 |
| 419175 | AW270037 | | KIAA0779 protein | 6.41 | 1286 |
| 438321 | AA576635 | Hs.6153 | CGI-48 protein | 6.41 | 3133 |
| 413582 | AW295647 | Hs.71331 | hypothetical protein MGC5350 | 6.41 | 736 |
| 429788 | U87791 | Hs.221040 | HBS1 (S. cerevisiae)-like | 6.40 | 2417 5426 |
| 410418 | D31382 | Hs.63325 | transmembrane protease, serine 4 | 6.40 | 476 |
| 410762 | AF226053 | Hs.66170 | HSKM-B protein | 6.39 | 4857 514 |
| 434614 | AI249502 | Hs.29669 | ESTs | 6.39 | 2852 |
| 411865 | AA248750 | Hs.12332 | ESTs | 6.39 | 582 |
| 416072 | AL110370 | Hs.79000 | growth associated protein 43 | 6.39 | 970 |
| 433345 | AI681545 | Hs.152982 | hypothetical protein FLJ13117 | 6.38 | 2757 |
| 412507 | L36645 | Hs.73964 | EphA4 | 6.38 | 4880 639 |
| 418004 | U37519 | Hs.87539 | aldehyde dehydrogenase 3 family, member | 6.37 | 1145 4997 |
| 422309 | U79745 | Hs.114924 | solute carrier family 16 (monocarboxylic | 6.36 | 1630 5146 |
| 415339 | NM_015156 | Hs.78398 | KIAA0071 protein | 6.36 | 4946 927 |
| 410340 | AW182833 | Hs.112188 | hypothetical protein FLJ13149 | 6.36 | 466 |
| 411352 | NM_002890 | Hs.758 | RAS p21 protein activator (GTPase activa | 6.35 | 4863 547 |
| 423739 | AA398155 | Hs.97600 | ESTs | 6.35 | 1771 |
| 419135 | R61448 | Hs.106728 | ESTs, Weakly similar to KIAA1353 protein | 6.33 | 1280 |
| 413450 | Z99716 | Hs.75372 | N-acetylgalactosaminidase, alpha- | 6.33 | 4901 723 |
| 447484 | AA464839 | Hs.292566 | hypothetical protein FLJ14697 | 6.33 | 3866 |
| 413063 | AL035737 | Hs.75184 | chitinase 3-like 1 (cartilage glycoprote | 6.33 | 692 |
| 419641 | BE170548 | Hs.118190 | Homo sapiens cDNA:FLJ21081 fis, clone C | 6.32 | 1342 |
| 400297 | AI127076 | Hs.306201 | hypothetical protein DKFZp564O1278 | 6.32 | 9 |
| 410963 | R78824 | Hs.44175 | KIAA0919 protein | 6.32 | 524 |
| 420234 | AW404908 | Hs.96038 | Ric (Drosophila)-like, expressed in many | 6.31 | 1399 |
| 408405 | AK001332 | Hs.44672 | hypothetical protein FLJ10470 | 6.30 | 264 4796 |
| 408331 | NM_007240 | Hs.44229 | dual specificity phosphatase 12 | 6.30 | 255 4793 |
| 451336 | AI264643 | Hs.3610 | ESTs | 6.29 | 4212 |
| 409327 | L41162 | Hs.53563 | collagen, type IX, alpha 3 | 6.29 | 361 4822 |
| 439211 | AI890347 | Hs.271923 | Homo sapiens cDNA:FLJ22785 fis, clone K | 6.27 | 3193 |
| 452223 | AA425467 | Hs.8035 | hypothetical protein MGC2827 | 6.25 | 4283 |
| 429925 | NM_000786 | Hs.226213 | cytochrome P450, 51 (lanosterol 14-alpha | 6.24 | 2428 |
| 420942 | H03514 | Hs.15589 | ESTs | 6.24 | 1467 |
| 411605 | AW006831 | | ESTs | 6.23 | 563 |
| 436299 | AK000767 | Hs.5111 | hypothetical protein FLJ20729 | 6.22 | 2977 5578 |
| 445903 | AI347487 | Hs.132781 | class I cytokine receptor | 6.22 | 3711 |
| 425836 | AW955696 | Hs.90960 | ESTs | 6.22 | 2000 |
| 431387 | AI878854 | Hs.252229 | v-maf musculoaponeurotic fibrosarcoma (a | 6.21 | 2552 |
| 437296 | AA350994 | Hs.20281 | KIAA1700 | 6.20 | 3057 |
| 414715 | AA587891 | Hs.904 | amylo-1,6-glucosidase, 4-alpha-glucanotr | 6.20 | 867 |
| 453204 | R10799 | Hs.191990 | ESTs | 6.18 | 4385 |
| 438452 | AI220911 | Hs.288959 | hypothetical protein FLJ20920 | 6.18 | 3139 |
| 434474 | AL042936 | Hs.211571 | holocytochrome c synthase (cytochrome c | 6.17 | 2842 |
| 404440 | | | NM_021048:Homo sapiens melanoma antigen, | 6.17 | 4721 54 |
| 430289 | AK001952 | Hs.238039 | hypothetical protein FLJ11090 | 6.16 | 2461 5440 |
| 426990 | AL044315 | Hs.173094 | Homo sapiens mRNA for KIAA1750 protein, | 6.15 | 2116 |
| 446494 | AA463276 | Hs.288906 | WW Domain-Containing Gene | 6.15 | 3755 |
| 453830 | AA534296 | Hs.20953 | ESTs | 6.15 | 4434 |
| 408713 | NM_001248 | Hs.47042 | ectonucleoside triphosphate diphosphohyd | 6.15 | 296 4804 |
| 423979 | AF229181 | Hs.136644 | CS box-containing WD protein | 6.15 | 1786 5191 |
| 412659 | AW753865 | Hs.74376 | olfactomedin related ER localized protei | 6.14 | 656 |
| 417601 | NM_014735 | Hs.82292 | KIAA0215 gene product | 6.14 | 1105 4991 |
| 422085 | AB018257 | Hs.288773 | zinc finger protein 294 | 6.14 | 1599 5135 |
| 417381 | AF164142 | Hs.82042 | solute carrier family 23 (nucleobase tra | 6.14 | 1089 4983 |
| 446390 | AA233393 | Hs.14992 | hypothetical protein FLJ11151 | 6.13 | 3749 |
| 441285 | NM_002374 | Hs.167 | microtubule-associated protein 2 | 6.12 | 3343 5616 |
| 409062 | AL157488 | Hs.50150 | Homo sapiens mRNA; cDNA DKFZp564B182 (fr | 6.12 | 329 |
| 440675 | AW005054 | Hs.279788 | ESTs, Weakly similar to KCC1_HUMAN CALCI | 6.11 | 3312 |
| 448072 | AI459306 | Hs.24908 | ESTs | 6.10 | 3940 |
| 430387 | AW372884 | Hs.240770 | nuclear cap binding protein subunit 2, 2 | 6.10 | 2479 |
| 424036 | AA770688 | | H2A histone family, member L | 6.10 | 1793 |
| 432908 | AI861896 | | ESTs | 6.10 | 2711 |
| 431512 | BE270734 | Hs.2795 | lactate dehydrogenase A | 6.09 | 2561 |
| 454293 | H49739 | Hs.134013 | ESTs, Moderately similar to HK61_HUMAN H | 6.09 | 4475 |
| 431452 | AI073641 | Hs.152372 | ESTs, Weakly similar to 2109260A B cell | 6.09 | 2556 |
| 447197 | R36075 | | gb:yh88b01.s1 Soares placenta Nb2HP Homo | 6.08 | 3828 |
| 427157 | U51166 | Hs.173824 | thymine-DNA glycosylase | 6.08 | 2127 5331 |
| 422725 | AA315703 | Hs.199993 | ESTs, Weakly similar to ALUB_HUMAN !!!! | 6.07 | 1676 |
| 436860 | H12751 | Hs.5327 | PRO1914 protein | 6.06 | 3012 |
| 426108 | AA622037 | Hs.166468 | programmed cell death 5 | 6.06 | 2028 |
| 419298 | AA853479 | Hs.89890 | pyruvate carboxylase | 6.05 | 1299 |
| 443695 | AW204099 | | ESTs, Weakly similar to AF126780 1 retin | 6.05 | 3541 |
| 438146 | Z36842 | Hs.57548 | ESTs | 6.05 | 3121 |
| 445786 | AW629819 | Hs.144502 | hypothetical protein FLJ22055 | 6.05 | 3697 |
| 442108 | AW452649 | Hs.166314 | ESTs | 6.04 | 3398 |
| 432374 | W68815 | Hs.301885 | Homo sapiens cDNA FLJ11346 fis, clone PL | 6.04 | 2660 |
| 414320 | U13616 | Hs.75893 | ankyrin 3, node of Ranvier (ankyrin G) | 6.03 | 4917 810 |
| 437330 | AL353944 | Hs.50115 | Homo sapiens mRNA; cDNA DKFZp761J1112 (f | 6.03 | 3058 |
| 447397 | BE247676 | Hs.18442 | E-1 enzyme | 6.03 | 3856 |
| 458814 | AI498957 | Hs.170861 | ESTs, Weakly similar to Z195_HUMAN ZINC | 6.03 | 4638 |
| 429429 | AA829725 | Hs.334437 | hypothetical protein MGC4248 | 6.03 | 2367 |
| 402736 | | | NM_024852:Homo sapiens hypothetical prot | 6.03 | 37 4706 |
| 450353 | AI244661 | Hs.103296 | ESTs, Weakly similar to S65657 alpha-1C- | 6.02 | 4132 |
| 453078 | AF053551 | Hs.31584 | metaxin 2 | 6.02 | 4373 5769 |
| 441659 | BE564162 | Hs.250820 | hypothetical protein FLJ14827 | 6.01 | 3366 |
| 439696 | W95298 | Hs.171882 | ESTs | 6.01 | 3230 |
| 417878 | U90916 | Hs.82845 | Homo sapiens cDNA:FLJ21930 fis, clone H | 6.00 | 1133 |
| 420956 | AA351584 | Hs.100543 | Homo sapiens clone 24505 mRNA sequence | 5.99 | 1468 |
| 445652 | AL117473 | Hs.13036 | DKFZP727A071 protein | 5.98 | 3690 5657 |
| 430300 | U60805 | Hs.238648 | oncostatin M receptor | 5.98 | 2465 5441 |
| 430935 | AW072916 | | zinc finger protein 131 (clone pHZ-10) | 5.98 | 2521 |
| 415276 | U88666 | Hs.78353 | SFRS protein kinase 2 | 5.97 | 4945 922 |
| 448369 | AW268962 | Hs.111335 | ESTs | 5.97 | 3961 |
| 431049 | AA846576 | Hs.103267 | hypothetical protein FLJ22548 similar to | 5.96 | 2527 |
| 417233 | W25005 | Hs.24395 | small inducible cytokine subfamily B (Cy | 5.96 | 1073 |
| 446882 | H13878 | Hs.165195 | Homo sapiens cDNA FLJ14237 fis, clone NT | 5.96 | 3800 |
| 422912 | AW405973 | Hs.11637 | ESTs | 5.96 | 1692 |
| 423134 | AJ012582 | Hs.124161 | hyperpolarization activated cyclic nucle | 5.96 | 1720 5170 |
| 429505 | AW820035 | Hs.278679 | a disintegrin and metalloproteinase doma | 5.95 | 2383 |
| 441623 | AA315805 | | desmoglein 2 | 5.94 | 3362 |
| 409407 | AW967370 | Hs.342655 | Homo sapiens cDNA FLJ13289 fis, clone OV | 5.94 | 367 |
| 408089 | H59799 | Hs.42644 | thioredoxin-like | 5.94 | 233 |
| 407110 | AA018042 | Hs.252085 | Prader-Willi/Angelman syndrome-5 | 5.93 | 125 |
| 452466 | N84635 | Hs.29664 | hypothetical protein DKFZp564B052 | 5.93 | 4312 |
| 450314 | AA574309 | Hs.283402 | TCR eta | 5.92 | 4128 |
| 452620 | AA436504 | Hs.119286 | ESTs | 5.92 | 4330 |
| 440325 | NM_003812 | Hs.7164 | a disintegrin and metalloproteinase doma | 5.91 | 3281 5606 |
| 407604 | AW191962 | | collagen, type VIII, alpha 2 | 5.91 | 172 |
| 449103 | T24968 | Hs.23038 | HSPC071 protein | 5.91 | 4036 |
| 416990 | AF124145 | Hs.80731 | autocrine motility factor receptor | 5.90 | 1049 4975 |
| 414844 | AA296874 | Hs.77494 | deoxyguanosine kinase | 5.90 | 884 |
| 430454 | AW469011 | Hs.105635 | ESTs | 5.90 | 2487 |
| 437915 | AI637993 | Hs.202312 | Homo sapiens clone N11 NTera2D1 teratoca | 5.89 | 3105 |
| 448939 | BE267795 | Hs.22595 | hypothetical protein FLJ10637 | 5.88 | 4021 |
| 426216 | N77630 | Hs.13895 | Homo sapiens cDNA FLJ11654 fis, clone HE | 5.88 | 2040 |
| 432329 | NM_002962 | Hs.2960 | S100 calcium-binding protein A5 | 5.88 | 2655 5506 |
| 452994 | AW962597 | Hs.31305 | KIAA1547 protein | 5.88 | 4363 |
| 441790 | AW294909 | Hs.132208 | ESTs | 5.86 | 3372 |
| 444099 | D87432 | Hs.10315 | solute carrier family 7 (cationic amino | 5.86 | 3575 5636 |
| 427658 | H61387 | Hs.30868 | nogo receptor | 5.86 | 2175 |
| 401866 | | | Target Exon | 5.86 | |
| 438510 | AL080220 | Hs.6285 | DKFZP586P0123 protein | 5.85 | 3143 5595 |
| 446813 | AA971436 | Hs.16218 | KIAA0903 protein | 5.85 | 3791 |
| 458748 | AI381530 | | gb:te76d07.x1 Soares_NFL_T_GBC_S1 Homo s | 5.85 | 4635 |
| 425523 | AB007948 | Hs.158244 | KIAA0479 protein | 5.85 | 1973 5268 |
| 428832 | AA578229 | Hs.324239 | ESTs, Moderately similar to ZN91_HUMAN Z | 5.85 | 2308 |
| 431846 | BE019924 | Hs.271580 | uroplakin 1B | 5.85 | 2605 |
| 422363 | T55979 | Hs.115474 | replication factor C (activator 1) 3 (38 | 5.84 | 1636 |
| 418322 | AA284166 | Hs.84113 | cyclin-dependent kinase inhibitor 3 (CDK | 5.84 | 1184 |
| 426158 | NM_001982 | Hs.199067 | v-erb-b2 avian erythroblastic leukemia v | 5.83 | 2033 5294 |
| 448122 | AW665656 | Hs.173187 | ESTs | 5.83 | 3946 |
| 436045 | AB037723 | Hs.5028 | DKFZP564O0423 protein | 5.83 | 2959 5574 |
| 442045 | C05768 | Hs.8078 | Homo sapiens clone FBD3 Cri-du-chat crit | 5.82 | 3390 |
| 409129 | AW296699 | Hs.103521 | serine arginine-rich pre-mRNA splicing f | 5.82 | 337 |
| 443162 | T49951 | Hs.9029 | DKFZP434G032 protein | 5.80 | 3500 |
| 448690 | AK001304 | Hs.21771 | Wolf-Hirschhorn syndrome candidate 2 | 5.80 | 3998 |
| 433017 | Y15067 | Hs.279914 | zinc finger protein 232 | 5.79 | 2722 5523 |
| 430168 | AW968343 | Hs.145582 | DKFZP434I1735 protein | 5.79 | 2449 |
| 449444 | AW818436 | | solute carrier family 16 (monocarboxylic | 5.79 | 4062 |
| 435798 | BE395289 | Hs.12720 | eIF4E-transporter | 5.78 | 2944 |
| 408411 | C15118 | Hs.322482 | hypothetical protein DKFZp566J2046 | 5.78 | 265 |
| 416179 | R19015 | Hs.79067 | MAD (mothers against decapentaplegic, Dr | 5.77 | 979 |
| 453902 | BE502341 | Hs.3402 | ESTs | 5.77 | 4449 |
| 422939 | AW394055 | Hs.98427 | ESTs, Weakly similar to I38022 hypotheti | 5.77 | 1695 |
| 434094 | AA305599 | Hs.238205 | hypothetical protein PRO2013 | 5.76 | 2814 |
| 437834 | AA769294 | | gb:nz36g03.s1 NCI_CGAP_GCB1 Homo sapiens | 5.76 | 3096 |
| 450516 | AA902656 | Hs.21943 | NIF3 (Ngg1 interacting factor 3, S.pombe | 5.76 | 4141 |
| 440043 | BE277457 | Hs.30661 | hypothetical protein MGC4606 | 5.75 | 3256 |
| 418816 | T29621 | Hs.88778 | carbonyl reductase 1 | 5.74 | 1243 |
| 437672 | AW748265 | Hs.5741 | flavohemoprotein b5? | 5.74 | 3080 |
| 433029 | NM_014322 | Hs.279926 | opsin 3 (encephalopsin) | 5.74 | 2726 5524 |
| 413585 | AI133452 | Hs.75431 | fibrinogen, gamma polypeptide | 5.73 | 737 |
| 413435 | X51405 | Hs.75360 | carboxypeptidase E | 5.73 | 4900 721 |
| 430044 | AA464510 | Hs.152812 | ESTs | 5.73 | 2439 |
| 439559 | AW364675 | Hs.173921 | ESTs, Weakly similar to 2109260A B cell | 5.73 | 3215 |
| 424130 | AL050136 | Hs.140945 | Homo sapiens mRNA; cDNA DKFZp586L141 (fr | 5.73 | 1806 |
| 441962 | AW972542 | Hs.289008 | Homo sapiens cDNA: FLJ21814 fis, clone H | 5.71 | 3384 |
| 433002 | AF048730 | Hs.279906 | cyclin T1 | 5.71 | 2720 5522 |
| 425463 | AK000740 | Hs.157986 | molybdenum cofactor sulfurase | 5.71 | 1968 5265 |
| 432728 | NM_006979 | Hs.278721 | HLA class II region expressed gene KE4 | 5.71 | 2694 5512 |
| 451351 | AW058261 | Hs.321435 | ESTs, Weakly similar to ALU1_HUMAN ALU S | 5.70 | 4214 |
| 404568 | | | NM_022071*:Homo sapiens hypothetical pro | 5.70 | 4723 56 |
| 419926 | AW900992 | Hs.93796 | DKFZP586D2223 protein | 5.70 | 1371 |
| 428654 | NM_012091 | Hs.188661 | adenosine deaminase, tRNA-specific 1 | 5.69 | 2280 5370 |
| 440351 | AF030933 | Hs.7179 | RAD1 (S. pombe) homolog | 5.68 | 3285 5607 |
| 448479 | H96115 | Hs.21293 | UDP-N-acteylglucosamine pyrophosphorylas | 5.67 | 3974 |
| 456141 | AI751357 | Hs.288741 | Homo sapiens cDNA: FLJ22256 fis, clone H | 5.66 | 4529 |
| 419539 | AF070590 | Hs.90869 | Homo sapiens clones 24622 and 24623 mRNA | 5.65 | 1328 |
| 409717 | AW452871 | Hs.56043 | CGI-115 protein | 5.64 | 400 |
| 408633 | AW963372 | Hs.46677 | PRO2000 protein | 5.64 | 286 |
| 409235 | AA188827 | Hs.7988 | ESTs, Weakly similar to I38022 hypotheti | 5.63 | 354 |
| 439580 | AF086401 | Hs.293847 | ESTs, Moderately similar to S65657 alpha | 5.63 | 3220 |
| 453935 | AI633770 | Hs.42572 | ESTs | 5.63 | 4453 |
| 420187 | AK001714 | Hs.95744 | hypothetical protein similar to ankyrin | 5.63 | 1393 5067 |
| 453271 | AA903424 | Hs.6786 | ESTs | 5.63 | 4390 |
| 424364 | AW383226 | Hs.163834 | ESTs, Weakly similar to G01763 atrophin- | 5.62 | 1835 |
| 415791 | H09366 | Hs.78853 | uracil-DNA glycosylase | 5.62 | 953 |
| 415701 | NM_003878 | Hs.78619 | gamma-glutamyl hydrolase (conjugase, fol | 5.62 | 4952 945 |
| 424723 | BE409813 | Hs.152337 | protein arginine N-methyltransferase 3(h | 5.61 | 1878 |
| 407930 | AA045847 | Hs.188361 | Homo sapiens cDNA FLJ12807 fis, clone NT | 5.60 | 215 |
| 408670 | AF160967 | Hs.46784 | potassium large conductance calcium-acti | 5.60 | 291 4803 |
| 447495 | AW401864 | Hs.18720 | programmed cell death 8 (apoptosis-induc | 5.59 | 3868 |
| 426318 | AA375125 | Hs.147112 | Homo sapiens cDNA:FLJ22322 fis, clone H | 5.59 | 2051 |
| 431448 | AL137517 | Hs.306201 | hypothetical protein DKFZp564O1278 | 5.58 | 2555 5476 |
| 452461 | N78223 | Hs.108106 | transcription factor | 5.58 | 4311 |
| 430598 | AK001764 | Hs.247112 | hypothetical protein FLJ10902 | 5.56 | 2499 5459 |
| 414343 | AL036166 | Hs.75914 | coated vesicle membrane protein | 5.56 | 814 |
| 433627 | AF078866 | Hs.284296 | Homo sapiens cDNA:FLJ22993 fis, clone K | 5.56 | 2774 5538 |
| 448045 | AJ297436 | Hs.20166 | prostate stem cell antigen | 5.55 | 3937 5706 |
| 428428 | AL037544 | Hs.184298 | cyclin-dependent kinase 7 (homolog of Xe | 5.55 | 2255 |
| 416883 | AW140128 | Hs.184902 | ESTs | 5.55 | 1033 |
| 420126 | NM_016255 | Hs.95260 | Autosomal Highly Conserved Protein | 5.55 | 1387 5064 |
| 408784 | AW971350 | Hs.63386 | ESTs | 5.55 | 307 |
| 417059 | AL037672 | Hs.81071 | extracellular matrix protein 1 | 5.55 | 1059 |
| 416782 | L35035 | Hs.79886 | ribose 5-phosphate isomerase A (ribose 5 | 5.53 | 1021 |
| 442366 | AA115629 | Hs.118531 | ESTs | 5.53 | 3425 |
| 429609 | AF002246 | Hs.210863 | cell adhesion molecule with homology to | 5.53 | 2394 5414 |
| 414612 | BE274552 | Hs.76578 | protein inhibitor of activated STAT3 | 5.53 | 854 |
| 419354 | M62839 | Hs.1252 | apolipoprotein H (beta-2-glycoprotein I) | 5.52 | 1303 5044 |
| 426252 | BE176980 | Hs.28917 | ESTs | 5.51 | 2044 |
| 437435 | AA249439 | Hs.27027 | hypothetical protein DKFZp762H1311 | 5.51 | 3065 |
| 435770 | AA699991 | Hs.348162 | gb:zi69a09.s1 Soares_fetal_liver_spleen_{—} | 5.51 | 2942 |
| 420230 | AL034344 | Hs.284186 | forkhead box C1 | 5.51 | 1398 5069 |
| 430539 | AK001489 | | ADP-ribosylation factor-like 1 | 5.50 | 2495 |
| 431899 | AA521381 | Hs.187726 | ESTs | 5.49 | 2614 |
| 455510 | AA422029 | Hs.143640 | ESTs, Weakly similar to hyperpolarizatio | 5.49 | 4512 |
| 451622 | AW139587 | Hs.30579 | Homo sapiens cDNA:FLJ23070 fis, clone L | 5.49 | 4236 |
| 448789 | BE539108 | Hs.22051 | hypothetical protein MGC15548 | 5.49 | 4007 |
| 434067 | H18913 | Hs.124023 | Homo sapiens cDNA FLJ14218 fis, clone NT | 5.48 | 2812 |
| 429687 | AI675749 | Hs.211608 | nucleoporin 153 kD | 5.48 | 2406 |
| 428816 | AA004986 | Hs.193852 | ATP-binding cassette, sub-family C (CFTR | 5.47 | 2303 |
| 442767 | AI017208 | Hs.131149 | ESTs | 5.45 | 3467 |
| 451259 | NM_006052 | Hs.26146 | Down syndrome critical region gene 3 | 5.45 | 4205 5740 |
| 453985 | N44545 | Hs.251865 | ESTs | 5.45 | 4457 |
| 452167 | N75238 | Hs.13075 | Homo sapiens cDNA:FLJ23013 fis, clone L | 5.45 | 4278 |
| 414341 | D80004 | Hs.75909 | KIAA0182 protein | 5.44 | 4919 813 |
| 452518 | AA280722 | Hs.24758 | ESTs, Weakly similar to I38022 hypotheti | 5.44 | 4321 |
| 438182 | AW342140 | Hs.182545 | ESTs,Weakly similar to ALU1_HUMAN ALU S | 5.43 | 3124 |
| 430057 | AW450303 | Hs.2534 | bone morphogenetic protein receptor, typ | 5.43 | 2441 |
| 433675 | AW977653 | Hs.75319 | ribonucleotide reductase M2 polypeptide | 5.43 | 2779 |
| 413476 | U25849 | Hs.75393 | acid phosphatase 1, soluble | 5.43 | 4902 726 |
| 430508 | AI015435 | Hs.104637 | ESTs | 5.42 | 2490 |
| 437204 | AL110216 | | ESTs, Weakly similar to I55214 salivary | 5.42 | 3043 |
| 430335 | D80007 | Hs.239499 | KIAA0185 protein | 5.41 | 2473 5448 |
| 446825 | BE266822 | Hs.344097 | filamin A, alpha (actin-binding protein- | 5.41 | 3792 |
| 409190 | AU076536 | Hs.50984 | sarcoma amplified sequence | 5.40 | 349 |
| 440282 | BE262386 | | clones 23667 and 23775 zinc finger prote | 5.40 | 3277 |
| 426860 | U04953 | Hs.172801 | isoleucine-tRNA synthetase | 5.40 | 2107 5325 |
| 414987 | AA524394 | Hs.294022 | hypothetical protein FLJ14950 | 5.39 | 898 |
| 451101 | N22587 | Hs.270134 | Homo sapiens cDNA FLJ11752 fis, clone HE | 5.38 | 4192 |
| 422611 | AA158177 | Hs.118722 | fucosyltransferase 8 (alpha (1,6) fucosy | 5.37 | 1662 |
| 440193 | AW902312 | Hs.7037 | Homo sapiens clone 24923 mRNA sequence | 5.37 | 3270 |
| 451593 | AF151879 | Hs.26706 | CGI-121 protein | 5.37 | 4231 5746 |
| 429503 | AA394183 | Hs.204166 | ESTs | 5.37 | 2381 |
| 427087 | BE073913 | Hs.173515 | uncharacterized hypothalamus protein HT0 | 5.36 | 2125 |
| 401403 | | | Target Exon | 5.36 | |
| 417731 | D26018 | Hs.82502 | polymerase (DNA directed), delta 3 | 5.35 | 1118 4993 |
| 444735 | BE019923 | Hs.243122 | hypothetical protein FLJ13057 similar to | 5.35 | 3623 |
| 417615 | BE548641 | Hs.82314 | hypoxanthine phosphoribosyltransferase 1 | 5.35 | 1107 |
| 416111 | AA033813 | Hs.79018 | chromatin assembly factor 1, subunit A ( | 5.34 | 972 |
| 408831 | AF090114 | Hs.48433 | endocrine regulator | 5.34 | 310 4807 |
| 413333 | M74028 | Hs.75297 | fibroblast growth factor 1 (acidic) | 5.34 | 712 |
| 416959 | D28459 | Hs.80612 | ubiquitin-conjugating enzyme E2A (RAD6 h | 5.33 | 1043 4973 |
| 457001 | J03258 | Hs.2062 | vitamin D (1,25-dihydroxyvitamin D3) re | 5.32 | 4574 5808 |
| 450251 | BE080483 | | gb:QV1-BT0630-280200-086-a05 BT0630 Homo | 5.32 | 4118 |
| 436961 | AW375974 | Hs.156704 | ESTs | 5.30 | 3023 |
| 452092 | BE245374 | Hs.27842 | hypothetical protein FLJ11210 | 5.30 | 4268 |
| 439680 | AW245741 | Hs.58461 | ESTs, Weakly similar to A35659 krueppel- | 5.30 | 3229 |
| 441865 | AA384726 | Hs.5722 | hypothetical protein FLJ23316 | 5.30 | 3376 |
| 443015 | R33261 | Hs.6614 | ESTs, Weakly similar to A43932 mucin 2 p | 5.29 | 3487 |
| 433388 | AI432672 | Hs.288539 | hypothetical protein FLJ22191 | 5.29 | 2759 |
| 421180 | BE410992 | Hs.258730 | heme-regulated initiation factor 2-alpha | 5.29 | 1486 |
| 410935 | BE067395 | Hs.66881 | dynein, cytoplasmic, intermediate polype | 5.28 | 521 |
| 427846 | AW499770 | Hs.180948 | KIAA0729 protein | 5.28 | 2200 |
| 437659 | AB007944 | Hs.5737 | KIAA0475 gene product | 5.28 | 3079 5589 |
| 442711 | AF151073 | Hs.8645 | hypothetical protein | 5.28 | 3460 5625 |
| 431197 | AL038596 | Hs.250745 | polymerase (RNA) III (DNA directed) (62 k | 5.27 | 2539 |
| 451945 | BE504055 | Hs.211420 | ESTs | 5.27 | 4258 |
| 402812 | | | NM_004930*:Homo sapiens capping protein | 5.26 | 39 4708 |
| 402802 | | | NM_001397:Homo sapiens endothelin conver | 5.26 | 38 4707 |
| 428417 | AK001699 | Hs.184227 | F-box only protein 21 | 5.26 | 2253 |
| 451468 | AW503398 | Hs.293663 | ESTs, Moderately similar to I38022 hypot | 5.25 | 4224 |
| 422975 | AA347720 | Hs.122669 | KIAA0264 protein | 5.25 | 1704 |
| 424395 | AA165082 | Hs.146388 | microtubule-associated protein 7 | 5.24 | 1839 |
| 434938 | AW500718 | Hs.8115 | Homo sapiens, clone MGC:16169, mRNA, com | 5.24 | 2880 |
| 458621 | AI221741 | Hs.117777 | ESTs | 5.24 | 4630 |
| 449209 | BE616830 | Hs.294145 | ESTs | 5.24 | 4046 |
| 443837 | AI984625 | Hs.9884 | spindle pole body protein | 5.23 | 3559 |
| 421977 | W94197 | Hs.110165 | ribosomal protein L26 homolog | 5.23 | 1588 |
| 433561 | BE540937 | Hs.20104 | hypothetical protein FLJ00052 | 5.22 | 2769 |
| 448555 | AI536697 | Hs.159863 | ESTs | 5.22 | 3984 |
| 428479 | Y00272 | Hs.334562 | cell division cycle 2, G1 to S and G2 to | 5.22 | 2264 5363 |
| 422072 | AB018255 | Hs.111138 | KIAA0712 gene product | 5.22 | 1597 5133 |
| 418250 | U29926 | Hs.83918 | adenosine monophosphate deaminase (isofo | 5.22 | 1173 5006 |
| 431771 | AW239175 | Hs.2853 | poly(rC)-binding protein 1 | 5.22 | 2597 |
| 410079 | U94362 | Hs.58589 | glycogenin 2 | 5.22 | 441 4837 |
| 449810 | AB008681 | Hs.23994 | activin A receptor, type IIB | 5.21 | 4085 5723 |
| 427735 | AA916785 | Hs.180610 | splicing factor proline/glutamine rich ( | 5.21 | 2192 |
| 424179 | F30712 | Hs.334573 | Homo sapiens, clone IMAGE:4285740, mRNA | 5.20 | 1812 |
| 448275 | BE514434 | Hs.20830 | kinesin-like 2 | 5.20 | 3955 |
| 421875 | AA299607 | Hs.98969 | ESTs | 5.20 | 1574 |
| 448770 | AA326683 | Hs.21992 | likely ortholog of mouse variant polyade | 5.19 | 4005 |
| 418248 | NM_005000 | Hs.83916 | NM_005000*:Homo sapiens NADH dehydrogena | 5.19 | 1172 5005 |
| 444563 | N57057 | Hs.284163 | ANKHZN protein | 5.19 | 3608 |
| 441181 | AA416925 | | peptidylprolyl isomerase (cyclophilin)-l | 5.19 | 3337 |
| 415025 | AW207091 | Hs.72307 | ESTs | 5.19 | 902 |
| 453496 | AA442103 | Hs.33084 | solute carrier family 2 (facilitated glu | 5.18 | 4413 |
| 400205 | | | NM_006265*:Homo sapiens RAD21 (S. pombe) | 5.18 | 1 4680 |
| 447881 | BE620886 | | GCN1 (general control of amino-acid synt | 5.17 | 3917 |
| 450052 | AI681298 | Hs.236524 | ESTs | 5.15 | 4100 |
| 452221 | C21322 | Hs.288057 | hypothetical protein FLJ22242 | 5.15 | 4282 |
| 404996 | | | Target Exon | 5.15 | |
| 432375 | BE536069 | Hs.2962 | S100 calcium-binding protein p | 5.15 | 2661 |
| 423493 | AI815965 | Hs.129683 | ubiquitin-conjugating enzyme E2D 1 (homo | 5.14 | 1753 |
| 452110 | T47667 | Hs.28005 | Homo sapiens cDNA FLJ11309 fis, clone PL | 5.14 | 4272 |
| 407804 | AF228603 | Hs.39957 | pleckstrin 2 (mouse) homolog | 5.14 | 197 4783 |
| 437258 | AL041243 | Hs.174104 | ESTs | 5.14 | 3050 |
| 447064 | AB002350 | Hs.17262 | KIAA0352 gene product | 5.14 | 3816 5680 |
| 448439 | BE613082 | Hs.28229 | ARG99 protein | 5.14 | 3970 |
| 420344 | BE463721 | Hs.97101 | putative G protein-coupled receptor | 5.13 | 1415 |
| 420440 | NM_002407 | Hs.97644 | mammaglobin 2 | 5.13 | 1422 5076 |
| 422616 | BE300330 | Hs.118725 | selenophosphate synthetase 2 | 5.13 | 1663 |
| 427254 | AL121523 | Hs.97774 | ESTs | 5.12 | 2135 |
| 451321 | AW593532 | Hs.124135 | Homo sapiens cDNA FLJ13051 fis, clone NT | 5.12 | 4210 |
| 449048 | Z45051 | Hs.22920 | similar to S68401 (cattle) glucose induc | 5.12 | 4031 |
| 428781 | AF164799 | Hs.193384 | putatative 28 kDa protein | 5.12 | 2297 5376 |
| 426230 | AA367019 | Hs.241395 | protease, serine, 1 (trypsin 1) | 5.11 | 2042 |
| 425649 | U30930 | Hs.158540 | UDP glycosyltransferase 8 (UDP-galactose | 5.11 | 1982 5273 |
| 440100 | BE382685 | Hs.158549 | ESTs, Weakly similar to T2D3_HUMAN TRANS | 5.11 | 3263 |
| 433037 | NM_014158 | Hs.279938 | HSPC067 protein | 5.10 | 2727 5525 |
| 441224 | AU076964 | Hs.7753 | calumenin | 5.10 | 3338 |
| 420734 | AW972872 | Hs.293736 | ESTs | 5.10 | 1447 |
| 419355 | AA428520 | Hs.90061 | progesterone binding protein | 5.09 | 1304 |
| 425673 | R70318 | Hs.339730 | ESTs | 5.09 | 1985 |
| 400583 | | | Target Exon | 5.09 | |
| 452737 | AK001680 | Hs.30488 | DKFZP434F091 protein | 5.09 | 4340 5762 |
| 421928 | AF013758 | Hs.109643 | polyadenylate binding protein-interactin | 5.09 | 1580 5129 |
| 439609 | AW971945 | Hs.293236 | ESTs | 5.08 | 3225 |
| 400277 | | | Eos Control | 5.08 | |
| 448100 | AV655272 | Hs.20252 | novel Ras family protein | 5.07 | 3941 |
| 445309 | AL157474 | Hs.12504 | likely ortholog of mouse Arkadia | 5.07 | 3667 5654 |
| 428180 | AI129767 | Hs.182874 | guanine nucleotide binding protein (G pr | 5.07 | 2226 |
| 412574 | BE410731 | Hs.74050 | follicular lymphoma variant translocatio | 5.07 | 648 |
| 444385 | BE278964 | Hs.11085 | CGI-111 protein | 5.06 | 3594 |
| 422095 | AI868872 | Hs.282804 | hypothetical protein FLJ22704 | 5.06 | 1603 |
| 435905 | AW997484 | Hs.5003 | KIAA0456 protein | 5.06 | 2951 |
| 417378 | R57256 | Hs.82037 | TATA box binding protein (TBP)-associate | 5.06 | 1088 |
| 453295 | W56819 | | ESTs, Weakly similar to 138022 hypotheti | 5.06 | 4391 |
| 422938 | NM _001809 | Hs.1594 | centromere protein A (17 kD) | 5.06 | 1694 5162 |
| 408363 | NM_003389 | Hs.44396 | coronin, actin-binding protein, 2A | 5.06 | 260 4794 |
| 424438 | AA340724 | Hs.271912 | ESTs, Weakly similar to A42442 integrin | 5.05 | 1845 |
| 435468 | AW362803 | Hs.166271 | ESTs | 5.05 | 2916 |
| 402053 | | | C11001722*:gi\|11436283\|ref\|XP_006959.1\| | 5.04 | |
| 419341 | N71463 | Hs.118888 | ESTs, Weakly similar to ALU1_HUMAN ALU S | 5.04 | 1302 |
| 400880 | | | NM_000611:Homo sapiens CD59 antigen p18 | 5.04 | 23 4694 |
| 428728 | NM_016625 | Hs.191381 | hypothetical protein | 5.04 | 2288 5373 |
| 429048 | AI372949 | Hs.44241 | Homo sapiens cDNA:FLJ21447 fis, clone C | 5.04 | 2329 |
| 428690 | AI948490 | Hs.98765 | ESTs | 5.04 | 2281 |
| 452256 | AK000933 | Hs.28661 | Homo sapiens cDNA FLJ10071 fis, clone HE | 5.04 | 4289 |
| 445495 | BE622641 | Hs.38489 | ESTs, Weakly similar to 138022 hypotheti | 5.03 | 3678 |
| 423554 | M90516 | Hs.1674 | glutamine-fructose-6-phosphate transamin | 5.03 | 1758 5182 |
| 436643 | AA757626 | Hs.10941 | ESTs, Weakly similar to IPP1_HUMAN PROTE | 5.03 | 2999 |
| 420522 | AW957137 | Hs.98541 | hypothetical protein | 5.03 | 1427 |
| 436995 | AI160015 | Hs.125489 | ESTs | 5.02 | 3026 |
| 421077 | AK000061 | Hs.101590 | hypothetical protein | 5.02 | 1479 5093 |
| 411412 | AJ001388 | Hs.69997 | zinc finger protein 238 | 5.02 | 4864 554 |
| 419551 | AW582256 | Hs.91011 | anterior gradient 2 (Xenepus laevis) hom | 5.02 | 1330 |
| 413687 | AI522318 | Hs.103819 | ESTs | 5.02 | 747 |
| 442313 | BE388898 | Hs.8215 | hypothetical protein FLJ11307 | 5.01 | 3413 |
| 408705 | AA312135 | Hs.46967 | HSPCO34 protein | 5.00 | 295 |
| 440660 | AI300101 | Hs.131886 | Homo sapiens cDNA: FLJ22113 fis, clone H | 5.00 | 3310 |
| 448920 | AW408009 | Hs.22580 | alkylglycerone phosphate synthase | 5.00 | 4020 |
| 439574 | AI469788 | | ESTs | 5.00 | 3219 |
| 437739 | AW579216 | Hs.264610 | ESTs, Moderately similar to Ibd1 [H. sapi | 4.99 | 3084 |
| 414405 | AI362533 | | KIAA0306 protein | 4.99 | 822 |
| 418661 | NM_001949 | Hs.1189 | E2F transcription factor 3 | 4.99 | 1222 5022 |
| 429966 | BE081342 | Hs.283037 | HSPC039 protein | 4.98 | 2431 |
| 408000 | L11690 | Hs.198689 | bullous pemphigoid antigen 1 (230/240 kD) | 4.98 | 223 4786 |
| 427209 | H06509 | Hs.92423 | KIAA1566 protein | 4.98 | 2132 |
| 421227 | R78581 | Hs.266308 | mosaic serine protease | 4.98 | 1492 |
| 451989 | AF169797 | Hs.27413 | adaptor protein containing pH domain, PT | 4.98 | 4260 5752 |
| 442328 | AI952430 | Hs.150614 | ESTs, Weakly similar to ALU4_HUMAN ALU S | 4.97 | 3419 |
| 422385 | BE549407 | Hs.115823 | ribonuclease P, 40 kD subunit | 4.97 | 1637 |
| 429617 | X89984 | Hs.211563 | B-cell CLL/lymphoma 7A | 4.97 | 2397 5417 |
| 434369 | AI650363 | Hs.116462 | ESTs | 4.97 | 2835 |
| 452144 | AA032197 | Hs.102558 | Homo sapiens, clone MGC:5352, mRNA, comp | 4.97 | 4275 |
| 436823 | AW749865 | Hs.117077 | ESTs, Weakly similar to I38022 hypotheti | 4.97 | 3009 |
| 451380 | H09280 | Hs.13234 | ESTs | 4.96 | 4218 |
| 427083 | NM_006363 | Hs.173497 | Sec23 (S. cerevisiae) homolog B | 4.96 | 2124 5330 |
| 418888 | AU076801 | Hs.89436 | cadherin 17, LI cadherin (liver-intestin | 4.95 | 1255 |
| 408771 | AW732573 | Hs.47584 | potassium voltage-gated channel, delayed | 4.95 | 305 |
| 446572 | AV659151 | Hs.282961 | ESTs | 4.95 | 3765 |
| 449145 | AI632122 | Hs.198408 | ESTs | 4.95 | 4039 |
| 433819 | AW511097 | Hs.112765 | ESTs | 4.95 | 2789 |
| 424905 | NM_002497 | Hs.153704 | NIMA (never in mitosis gene a)-related k | 4.95 | 1898 5237 |
| 424163 | NM_007071 | Hs.142245 | HERV-H LTR-associating 3 | 4.94 | 1811 5201 |
| 436865 | AW880358 | Hs.339808 | hypothetical protein FLJ10120 | 4.94 | 3014 |
| 449437 | AI702038 | Hs.100057 | Homo sapiens cDNA: FLJ22902 fis, clone K | 4.94 | 4061 |
| 415558 | AA885143 | Hs.125719 | ESTs | 4.94 | 937 |
| 425683 | AB037813 | Hs.159200 | hypothetical protein DKFZp762K222 | 4.94 | 1987 5275 |
| 453891 | AB037751 | Hs.36353 | Homo sapiens mRNA full length insert cDN | 4.93 | 4446 5787 |
| 438613 | C05569 | Hs.243122 | hypothetical protein FLJ13057 similar to | 4.93 | 3153 |
| 402408 | | | NM_030920*:Homo sapiens hypothetical pro | 4.93 | 33 4703 |
| 428829 | R14050 | Hs.194051 | Homo sapiens mRNA; cDNA DKFZp566B213 (fr | 4.93 | 2306 |
| 418699 | BE539639 | Hs.173030 | ESTs, Weakly similar to ALU8_HUMAN ALU S | 4.92 | 1229 |
| 422576 | BE548555 | Hs.118554 | CGI-83 protein | 4.92 | 1659 |
| 415068 | Z19448 | Hs.131887 | ESTs, Weakly similar to T24396 hypotheti | 4.92 | 904 |
| 410275 | U85658 | Hs.61796 | transcription factor AP-2 gamma (activat | 4.92 | 462 4842 |
| 432540 | AI821517 | Hs.105866 | ESTs | 4.92 | 2678 |
| 422168 | AA586894 | Hs.112408 | S100 calcium-binding protein A7 (psorias | 4.92 | 1612 |
| 411704 | AI499220 | Hs.71573 | hypothetical protein FLJ10074 | 4.91 | 571 |
| 418803 | U50079 | Hs.88556 | histone deacetylase 1 | 4.90 | 1241 5029 |
| 401747 | | | Homo sapiens keratin 17 (KRT17) | 4.90 | |
| 437387 | AI198874 | Hs.28847 | AD026 protein | 4.90 | 3062 |
| 433929 | AI375499 | Hs.27379 | ESTs | 4.90 | 2799 |
| 411251 | R19774 | Hs.22835 | HHGP protein | 4.90 | 542 |
| 422567 | AF111178 | Hs.118407 | glypican 6 | 4.89 | 1658 5154 |
| 424956 | AW198103 | Hs.18724 | ESTs, Weakly similar to granule cell mar | 4.89 | 1902 |
| 414051 | BE244127 | | gb:TCBAP1E0661 Pediatric pre-B cell acut | 4.89 | 778 |
| 447083 | AI472124 | Hs.157757 | ESTs | 4.89 | 3820 |
| 456977 | AK000252 | Hs.169758 | hypothetical protein FLJ20245 | 4.88 | 4572 5807 |
| 446795 | AI797713 | Hs.156471 | ESTs | 4.88 | 3788 |
| 421515 | Y11339 | Hs.105352 | GalNAc alpha-2, 6-sialyltransferase I, I | 4.88 | 1532 5113 |
| 438705 | AI049624 | Hs.283390 | ESTs, Weakly similar to 2109260A B cell | 4.88 | 3160 |
| 441553 | AA281219 | Hs.121296 | ESTs | 4.87 | 3357 |
| 417715 | AW969587 | Hs.86366 | ESTs | 4.87 | 1115 |
| 442229 | AI885776 | Hs.8164 | Mulibrey nanism | 4.87 | 3406 |
| 436797 | AA731491 | Hs.334477 | hypothetical protein MGC14879 | 4.87 | 3007 |
| 442739 | NM_007274 | Hs.8679 | cytosolic acyl coenzyme A thioester hydr | 4.87 | 3464 5626 |
| 407813 | AL120247 | Hs.40109 | KIAA0872 protein | 4.87 | 200 |
| 457819 | AA057484 | Hs.35406 | FLJ20522 Hypothetical protein FLJ20522 | 4.86 | 4601 |
| 430291 | AV660345 | Hs.238126 | CGI-49 protein | 4.86 | 2462 |
| 430396 | D49742 | Hs.241363 | hyaluronan-binding protein 2 | 4.86 | 2481 5450 |
| 428330 | L22524 | Hs.2256 | matrix metalloproteinase 7 (matrilysin, | 4.85 | 2241 5354 |
| 427719 | AI393122 | Hs.134726 | ESTs | 4.85 | 2189 |
| 442660 | AW138174 | Hs.130651 | ESTs | 4.85 | 3458 |
| 435858 | AF254260 | Hs.283009 | tuftelin 1 | 4.84 | 2950 5572 |
| 443179 | AI928402 | Hs.6933 | hypothetical protein FLJ12684 | 4.84 | 3503 |
| 414591 | AI888490 | Hs.55902 | ESTs, Weakly similar to ALU8_HUMAN ALU S | 4.84 | 850 |
| 438459 | T49300 | Hs.35304 | Homo sapiens cDNA FLJ13655 flu, clone PL | 4.84 | 3140 |
| 409262 | AK000631 | Hs.52256 | hypothetical protein FLJ20624 | 4.84 | 355 4819 |
| 407198 | H91679 | | gb:yv04a07.s1 Soares fetal liver spleen | 4.84 | 135 |
| 450737 | AW007152 | Hs.63325 | transmembrane protease, serine 4 | 4.84 | 4157 |
| 421202 | AF193339 | Hs.102506 | eukaryotic translation initiation factor | 4.83 | 1489 5097 |
| 419586 | AI088485 | Hs.144759 | ESTs, Weakly similar to I38022 hypotheti | 4.83 | 1335 |
| 452459 | AI356895 | Hs.49359 | hypothetical protein DKFZp547E052 | 4.83 | 4310 |
| 413429 | BE139117 | Hs.278881 | ESTs | 4.83 | 719 |
| 443426 | AF098158 | Hs.9329 | chromosome 20 open reading frame 1 | 4.82 | 3523 5627 |
| 413431 | AW246428 | Hs.75355 | ubiquitin-conjugating enzyme E2N (homolo | 4.82 | 720 |
| 427832 | AF038362 | Hs.180930 | TBP-associated factor 172 | 4.82 | 2198 5347 |
| 430000 | AW205931 | Hs.99598 | hypothetical protein MGC5338 | 4.80 | 2435 |
| 408296 | AL117452 | Hs.44155 | DKFZP586G1517 protein | 4.80 | 252 4792 |
| 447444 | AK000318 | Hs.18616 | hypothetical protein FLJ20311 | 4.80 | 3862 5689 |
| 425387 | AB037864 | Hs.156051 | KIAA1443 protein | 4.80 | 1958 5260 |
| 447514 | AI809314 | Hs.208501 | ESTs, Weakly similar to B34087 hypotheti | 4.80 | 3872 |
| 430333 | S70114 | Hs.239489 | TIA1 cytotoxic granule-associated RNA-bi | 4.79 | 2472 5447 |
| 435092 | AL137310 | Hs.4749 | Homo sapiens mRNA; cDNA DKFZp761E13121 ( | 4.79 | 2895 5562 |
| 412537 | AL031778 | | nuclear transcription factor Y, alpha | 4.79 | 644 |
| 407204 | R41933 | Hs.140237 | ESTs, Weakly similar to ALU1_HUMAN ALU S | 4.79 | 136 |
| 417366 | BE185289 | Hs.1076 | small proline-rich protein 1B (cornifin) | 4.78 | 1087 |
| 411387 | AW842339 | Hs.130815 | hypothetical protein FLJ21870 | 4.78 | 550 |
| 422244 | Y08890 | Hs.113503 | karyopherin (importin) beta 3 | 4.78 | 1619 5143 |
| 448186 | AA262105 | Hs.4094 | Homo sapiens cDNA FLJ14208 fis, clone NT | 4.78 | 3949 |
| 422420 | U03398 | Hs.1524 | tumor necrosis factor (ligand) superfami | 4.78 | 1643 5150 |
| 421898 | AA259011 | Hs.109268 | hypothetical protein FLJ12552 | 4.78 | 1578 |
| 408349 | BE546947 | Hs.44276 | homeo box C10 | 4.78 | 258 |
| 445892 | AV655500 | Hs.93961 | Homo sapiens mRNA; cDNA DKFZp667D095 (fr | 4.78 | 3709 |
| 414108 | AI267592 | Hs.75761 | SFRS protein kinase 1 | 4.78 | 788 |
| 442961 | BE614474 | | F-box only protein 22 | 4.77 | 3484 |
| 441024 | AW081530 | Hs.268231 | ESTs | 4.77 | 3327 |
| 448552 | AW973653 | Hs.20104 | hypothetical protein FLJ00052 | 4.77 | 3983 |
| 424197 | AF096834 | Hs.142989 | germ cell specific Y-box binding protein | 4.77 | 1814 5202 |
| 414222 | AL135173 | Hs.878 | sorbitol dehydrogenase | 4.76 | 805 |
| 425769 | U72513 | Hs.159486 | Human RPL13-2 pseudogene mRNA, complete | 4.76 | 1995 |
| 425424 | NM_004954 | Hs.157199 | ELKL motif kinase | 4.75 | 1962 5263 |
| 426699 | AA383337 | Hs.121269 | ESTs | 4.75 | 2089 |
| 424085 | NM_002914 | Hs.139226 | replication factor C (activator 1) 2 (40 | 4.75 | 1803 5198 |
| 438869 | AF075009 | | gb:Homo sapiens full length insert cDNA | 4.75 | 3171 |
| 451027 | AW519204 | Hs.40808 | Homo sapiens, Similar to RIKEN cDNA 2810 | 4.74 | 4183 |
| 422684 | BE561617 | Hs.119192 | H2A histone family, member Z | 4.74 | 1673 |
| 403485 | | | C3001813*:gi\|12737279\|ref\|XP_012163.1\|k | 4.74 | |
| 447334 | AA515032 | Hs.91109 | ESTs | 4.74 | 3844 |
| 441989 | AA306207 | Hs.286241 | protein kinase, cAMP-dependent, regulato | 4.74 | 3385 |
| 432673 | AB028859 | Hs.278605 | DnaJ (Hsp40) homolog, subfamily B, membe | 4.73 | 2689 5510 |
| 448362 | AA641767 | Hs.21015 | hypothetical protein DKFZp564L0864 simil | 4.73 | 3960 |
| 453199 | AI336266 | Hs.32353 | mitogen-activated protein kinase kinase | 4.73 | 4384 |
| 450149 | AW969781 | Hs.132863 | Zic family member 2 (odd-paired Drosophi | 4.73 | 4106 |
| 419502 | AU076704 | | fibrinogen, A alpha polypeptide | 4.72 | 1321 |
| 442787 | W93048 | Hs.250723 | hypothetical protein MGC2747 | 4.72 | 3469 |
| 447764 | NM_003776 | Hs.19500 | nuclear localization signal deleted in v | 4.72 | 3902 5700 |
| 425118 | AU076611 | Hs.154672 | methylene tetrahydrofolate dehydrogenase | 4.71 | 1923 |
| 438714 | AA814859 | | ESTs | 4.71 | 3161 |
| 409463 | AI458165 | Hs.17296 | hypothetical protein MGC2376 | 4.71 | 375 |
| 429610 | AB024937 | Hs.211092 | LUNX protein; PLUNC (palate lung and nas | 4.70 | 2395 5415 |
| 411031 | W37943 | Hs.34892 | KIAA1323 protein | 4.70 | 530 |
| 409445 | AW341217 | Hs.14139 | ESTs, Weakly similar to JC5314 CDC28/cdc | 4.70 | 373 |
| 446019 | AI362520 | | histone deacetylase 3 | 4.70 | 3719 |
| 440074 | AA863045 | Hs.10669 | ESTs, Weakly similar to T00050 hypotheti | 4.70 | 3259 |
| 415989 | AI267700 | | ESTs | 4.70 | 963 |
| 415992 | C05837 | Hs.145807 | hypothetical protein FLJ13593 | 4.70 | 964 |
| 439772 | AL365406 | Hs.10268 | Homo sapiens mRNA full length insert cDN | 4.69 | 3234 |
| 414462 | BE622743 | Hs.301064 | arfaptin 1 | 4.69 | 831 |
| 433626 | AF078859 | Hs.86347 | hypothetical protein | 4.69 | 2773 5537 |
| 430512 | AF182294 | Hs.241578 | U6 snRNA-associated Sm-like protein LSm8 | 4.68 | 2491 5453 |
| 446269 | AW263155 | Hs.14559 | hypothetical protein FLJ10540 | 4.68 | 3741 |
| 412828 | AL133396 | Hs.74621 | prion protein (p27-30) (Creutzfeld-Jakob | 4.68 | 4889 675 |
| 409342 | AU077058 | Hs.54089 | BRCA1 associated RING domain 1 | 4.68 | 362 |
| 407907 | AI752235 | Hs.41270 | procollagen-lysine, 2-oxoglutarate 5-dio | 4.68 | 214 |
| 416586 | D44643 | Hs.14144 | secreted modular calcium-binding protein | 4.67 | 1005 |
| 442592 | BE566623 | Hs.29899 | ESTs, Weakly similar to G02075 transcrip | 4.67 | 3450 |
| 432378 | AI493046 | Hs.146133 | ESTs | 4.67 | 2662 |
| 423551 | AA327598 | Hs.89633 | ESTs | 4.67 | 1757 |
| 453753 | BE252983 | Hs.35086 | ubiquitin specific protease 1 | 4.67 | 4429 |
| 452834 | AI638627 | Hs.105685 | KIAA1688 protein | 4.66 | 4352 |
| 445733 | BE295568 | Hs.13225 | UDP-Gal:betaGlcNAc beta 1,4-galactosylt | 4.66 | 3696 |
| 430027 | AB023197 | Hs.227743 | KIAA0980 protein | 4.65 | 2438 5433 |
| 403817 | | | NM_015271:Homo sapiens tripartite motif- | 4.65 | 4716 48 |
| 453742 | AB037744 | Hs.34892 | KIAA1323 protein | 4.65 | 4427 5781 |
| 417665 | AW852858 | Hs.22862 | ESTs | 4.65 | 1110 |
| 412970 | AB026436 | Hs.177534 | dual specificity phosphatase 10 | 4.65 | 4890 687 |
| 441377 | BE218239 | Hs.202656 | ESTs | 4.65 | 3349 |
| 438898 | AI819863 | Hs.106243 | ESTs | 4.65 | 3177 |
| 428386 | R17298 | Hs.295923 | seven in absentia (Drosophila) homolog 1 | 4.65 | 2248 |
| 449644 | AW960707 | Hs.148324 | ESTs | 4.84 | 4072 |
| 424511 | BE300512 | Hs.193557 | ESTs, Moderately similar to ALU7_HUMAN A | 4.64 | 1854 |
| 415632 | U67085 | Hs.78524 | TcD37 homolog | 4.63 | 4950 939 |
| 427779 | AA906997 | Hs.180780 | TERA protein | 4.63 | 2195 |
| 422486 | BE514492 | Hs.117487 | gene near HD on 4p16.3 with homology to | 4.63 | 1648 |
| 406627 | T64904 | Hs.163780 | ESTs | 4.63 | 80 |
| 418529 | AW005695 | Hs.250897 | TRK-fused gene | 4.63 | 1212 |
| 453785 | AI368236 | Hs.283732 | ESTs, Moderately similar to ALU1_HUMAN A | 4.62 | 4432 |
| 416902 | AA375634 | Hs.288974 | hypothetical protein FLJ12528 | 4.61 | 1035 |
| 436505 | AJ277841 | Hs.120963 | ELG protein | 4.60 | 2990 5580 |
| 438378 | AW970529 | Hs.86434 | hypothetical protein FLJ21816 | 4.60 | 3136 |
| 442760 | BE075297 | Hs.6614 | ESTs, Weakly similar to A43932 mucin 2 p | 4.60 | 3466 |
| 432339 | AW411259 | | ESTs | 4.60 | 2656 |
| 452567 | D87120 | Hs.29882 | predicted osteoblast protein | 4.59 | 4326 5759 |
| 447850 | AB018298 | Hs.19822 | SEC24 (S. cerevisiae) related gene famil | 4.59 | 3914 5702 |
| 443171 | BE281128 | Hs.9030 | TONDU | 4.59 | 3501 |
| 448854 | AW245617 | Hs.77703 | hypothetical protein FLJ11506 | 4.59 | 4314 |
| 423681 | AB023215 | Hs.131525 | Homo sapiens mRNA; cDNA DKFZp434E199 (fr | 4.58 | 1766 5184 |
| 420750 | AW190215 | Hs.62348 | hypothetical protein FLJ11753 | 4.58 | 1449 |
| 439866 | AA280717 | Hs.6727 | Ras-GTPase activating protein SH3 domain | 4.58 | 3240 |
| 446719 | W39500 | Hs.301872 | hypothetical protein MGC4840 | 4.58 | 3779 |
| 429588 | AI080271 | | ESTs | 4.58 | 2391 |
| 417171 | BE613486 | Hs.81412 | lipin 1 | 4.57 | 1067 |
| 452279 | AA286844 | | hypothetical protein FLJ13164 | 4.57 | 4293 |
| 408483 | AA464836 | Hs.291079 | ESTs, Weakly similar to T27173 hypotheti | 4.57 | 271 |
| 430569 | AF241254 | Hs.178098 | angiotensin I converting enzyme (peptidy | 4.57 | 2496 5456 |
| 440773 | AA352702 | Hs.37747 | Homo sapiens, Similar to RIKEN cDNA 2700 | 4.56 | 3318 |
| 418422 | AW440068 | Hs.59425 | hypothetical protein FLJ23323 | 4.56 | 1199 |
| 447519 | U46258 | Hs.339665 | ESTs | 4.56 | 3873 |
| 434834 | AF156774 | Hs.324020 | 1-acylglycerol-3-phosphate O-acyltransfe | 4.56 | 2872 5557 |
| 412560 | R24601 | | CCR4-NOT transcription complex, subunit | 4.55 | 645 |
| 449571 | AW016812 | Hs.200266 | ESTs | 4.55 | 4069 |
| 432502 | NM_014641 | Hs.277585 | KIAA0170 gene product | 4.55 | 2674 5508 |
| 422630 | AA313606 | Hs.13809 | hypothetical protein FLJ10648 | 4.55 | 1664 |
| 423673 | BE003054 | Hs.1695 | matrix metalloproteinase 12 (macrophage | 4.55 | 1765 |
| 443228 | W24781 | Hs.293798 | KIAA1710 protein | 4.55 | 3510 |
| 427283 | AL119796 | Hs.174185 | ectonucleotide pyrophosphatase/phosphodi | 4.55 | 2137 |
| 408761 | AA057264 | Hs.238936 | ESTs, Weakly similar to (defline not ava | 4.54 | 304 |
| 408743 | AL110246 | Hs.47367 | KIAA1785 protein | 4.54 | 301 |
| 448822 | BE149845 | Hs.289038 | hypothetical protein MGC4126 | 4.54 | 4010 |
| 443450 | N66045 | Hs.133529 | ESTs | 4.54 | 3524 |
| 441021 | AW578716 | Hs.7644 | H1 histone family, member 2 | 4.53 | 3326 |
| 446111 | W56338 | Hs.13880 | CGI-143 protein | 4.53 | 3725 |
| 436679 | AI127483 | Hs.120451 | ESTs, Weakly similar to unnamed protein | 4.53 | 3002 |
| 433586 | T85301 | | gb:yd78d06.s1 Soares fetal liver spleen | 4.53 | 2770 |
| 412811 | H06382 | | ESTs | 4.52 | 673 |
| 450770 | AA019924 | Hs.28803 | ESTs | 4.52 | 4163 |
| 420439 | AW270041 | | eukaryotic translation initiation factor | 4.52 | 1421 |
| 418663 | AK001100 | Hs.41690 | desmocollin 3 | 4.52 | 1223 |
| 430299 | W28673 | Hs.106747 | serine carboxypeptidase 1 precursor prot | 4.52 | 2464 |
| 422040 | AA172106 | Hs.110950 | Rag C protein | 4.52 | 1595 |
| 429504 | X99133 | Hs.204238 | lipocalin 2 (oncogene 24p3) (NGAL) | 4.51 | 2382 5411 |
| 450187 | AA736788 | Hs.78521 | KIAA1717 protein | 4.51 | 4110 |
| 443257 | AI334040 | Hs.11614 | HSPC065 protein | 4.51 | 3514 |
| 415691 | AW963979 | Hs.24723 | ESTs | 4.51 | 944 |
| 445867 | AF272663 | Hs.13405 | gephyrin | 4.51 | 3705 5660 |
| 424075 | AI807320 | Hs.227630 | RE1-silencing transcription factor | 4.51 | 1799 |
| 445165 | AV652831 | Hs.234058 | gb:AV652831 GLC Homo sapiens cDNA clone | 4.51 | 3658 |
| 421743 | T35958 | Hs.107614 | DKFZP56411171 protein | 4.51 | 1557 |
| 447805 | AW627932 | Hs.302421 | gemin4 | 4.50 | 3908 |
| 440146 | AW014231 | Hs.90790 | Homo sapiens cDNA:FLJ22930 fis, clone K | 4.50 | 3268 |
| 448610 | NM_006157 | Hs.21602 | nel (chicken)-like 1 | 4.50 | 3989 5712 |
| 432706 | NM_013230 | Hs.286124 | CD24 antigen (small cell lung carcinoma | 4.50 | 2691 5511 |
| 408882 | H12084 | Hs.31110 | ESTs, Weakly similar to MAGE-B4 [H. sapie | 4.49 | 315 |
| 450747 | AI064821 | Hs.318535 | ESTs, Highly similar to 1818357A EWS gen | 4.49 | 4159 |
| 430178 | AW449612 | Hs.152475 | 3'UTR of:achaete-scute complex (Drosoph | 4.49 | 2451 |
| 419594 | AA013051 | Hs.91417 | topoisomerase (DNA) II binding protein | 4.49 | 1339 |
| 435641 | AI147545 | Hs.114172 | ESTs | 4.49 | 2933 |
| 420005 | AW271106 | Hs.133294 | ESTs | 4.48 | 1372 |
| 402496 | | | Target Exon | 4.48 | |
| 425997 | AK000086 | Hs.165948 | hypothetical protein FLJ20079 | 4.48 | 2018 5286 |
| 420662 | R71292 | Hs.99821 | hypothetical protein FLJ14547 | 4.48 | 1442 |
| 429651 | D79248 | Hs.279870 | ESTs, Weakly similar to A46010 X-linked | 4.48 | 2401 |
| 431130 | NM_006103 | Hs.2719 | HE4; epididymis-specific, whey-acidic pr | 4.48 | 2533 5470 |
| 425177 | AF127577 | Hs.155017 | nuclear receptor interacting protein 1 | 4.47 | 1933 5250 |
| 433323 | AA805132 | Hs.159142 | ESTs | 4.47 | 2755 |
| 421437 | AW821252 | Hs.104336 | hypothetical protein | 4.47 | 1519 |
| 427969 | NM_001963 | Hs.2230 | epidermal growth factor (beta-urogastron | 4.47 | 2208 5348 |
| 420798 | W93774 | Hs.99936 | keratin 10 (epidermolytic hyperkeratosis | 4.47 | 1454 |
| 440590 | AI863446 | Hs.266308 | mosaic serine protease | 4.46 | 3301 |
| 452598 | AI831594 | | ESTs, Weakly similar to ALU7_HUMAN ALU S | 4.46 | 4328 |
| 456439 | AA251242 | Hs.103238 | ESTs | 4.46 | 4542 |
| 447574 | AF162666 | Hs.18895 | tousled-like kinase 1 | 4.46 | 3881 5694 |
| 437469 | AW753112 | Hs.15514 | hypothetical protein MGC3260 | 4.46 | 3066 |
| 410444 | W73484 | Hs.132554 | gb:zd54e04.s1 Soares_fetal_heart_NbHH19W | 4.46 | 480 |
| 452689 | F33868 | Hs.284176 | transferrin | 4.45 | 4335 |
| 447832 | AI433357 | | ESTs | 4.45 | 3911 |
| 441381 | H22195 | Hs.31874 | ESTs | 4.45 | 3351 |
| 425548 | AA890023 | Hs.1906 | prolactin receptor | 4.45 | 1978 |
| 429702 | AA456883 | Hs.79889 | ESTs | 4.45 | 2409 |
| 450669 | AL138077 | Hs.16157 | hypothetical protein FLJ12707 | 4.45 | 4146 |
| 446742 | AA232119 | Hs.16085 | putative G-protein coupled receptor | 4.45 | 3780 |
| 421814 | L12350 | Hs.108623 | thrombospondin 2 | 4.45 | 1567 5124 |
| 445160 | AI299144 | Hs.101937 | sine oculis homeobox (Drosophila) homolo | 4.44 | 3657 |
| 437763 | AA469369 | Hs.5831 | tissue inhibitor of metalloproteinase 1 | 4.44 | 3089 |
| 449343 | AI151418 | | protein phosphatase 3 (formerly 2B), cat | 4.44 | 4056 |
| 426765 | AA743603 | Hs.172108 | nucleoporin 88 kD | 4.44 | 2096 |
| 408527 | AL135018 | Hs.33074 | Homo sapiens, clone IMAGE:3606519, mRNA, | 4.44 | 276 |
| 438360 | H74149 | Hs.288193 | hypothetical protein MGC12217 | 4.43 | 3134 |
| 432840 | AK001403 | Hs.279521 | hypothetical protein FLJ20530 | 4.43 | 2704 5516 |
| 415443 | T07353 | Hs.7948 | ESTs | 4.43 | 931 |
| 429084 | AJ001443 | Hs.195614 | splicing factor 3b, subunit 3, 130 kD | 4.43 | 2332 5390 |
| 406687 | M31126 | | matrix metalloproteinase 11 (stromelysin | 4.43 | 4747 85 |
| 454417 | AI244459 | Hs.110826 | trinucleotide repeat containing 9 | 4.43 | 4480 |
| 417534 | NM_004998 | Hs.82251 | myosin IE | 4.43 | 1100 4989 |
| 421754 | N76984 | Hs.107922 | hypothetical protein | 4.42 | 1558 |
| 410054 | AL120050 | Hs.58220 | Homo sapiens cDNA:FLJ23005 fis, clone L | 4.41 | 435 |
| 450684 | AA872605 | Hs.25333 | interleukin 1 receptor, type II | 4.41 | 4148 |
| 446567 | NM_007247 | Hs.15384 | AP1 gamma subunit binding protein 1 | 4.41 | 3764 5672 |
| 428474 | AB023182 | Hs.184523 | KIAA0965 protein | 4.41 | 2263 5362 |
| 446356 | AI816736 | Hs.14896 | DHHC1 protein | 4.40 | 3747 |
| 447155 | AA100605 | Hs.121557 | ESTs, Weakly similar to DP1_HUMAN POLYPO | 4.40 | 3827 |
| 416852 | AF283776 | Hs.80285 | Homo sapiens mRNA:cDNA DKFZp586C1723 (f | 4.40 | 1030 |
| 419713 | AW968058 | Hs.92381 | nudix (nucleoside diphosphate linked moi | 4.40 | 1352 |
| 421609 | H39924 | Hs.106148 | Homo sapiens mRNA; cDNA DKFZp434G0972 (f | 4.40 | 1543 |
| 432350 | NM_005865 | Hs.274407 | protease, serine, 16 (thymus) | 4.40 | 2658 5507 |
| 451273 | NM_014811 | Hs.26163 | KIAA0649 gene product | 4.40 | 4206 5741 |
| 418757 | AI864193 | Hs.169728 | hypothetical protein FLJ13150 | 4.40 | 1236 |
| 415660 | AI909007 | Hs.78563 | ubiquitin-conjugating enzyme E2G 1 (homo | 4.40 | 943 |
| 439588 | AA838166 | Hs.174644 | hypothetical protein FLJ21669 | 4.39 | 3221 |
| 427678 | BE267756 | Hs.180312 | mitochondrial ribosomal protein S16 | 4.39 | 2180 |
| 418259 | AA215404 | | ESTs | 4.39 | 1174 |
| 450649 | NM_001429 | Hs.25272 | E1A binding protein p300 | 4.38 | 4143 5732 |
| 446783 | AW138343 | Hs.141867 | ESTs | 4.38 | 3786 |
| 401464 | | | histone deacetylase 5 | 4.38 | |
| 402855 | | | NM_001839*:Homo sapiens calponin 3, acid | 4.38 | 40 4709 |
| 448256 | BE614149 | Hs.20814 | CGI-27 protein | 4.38 | 3952 |
| 442053 | R35343 | Hs.24968 | Human DNA sequence from clone RP1-233G16 | 4.38 | 3391 |
| 435248 | AA676865 | Hs.188965 | ESTs | 4.38 | 2902 |
| 418867 | D31771 | Hs.89404 | msh (Drosophila) homeo box homolog 2 | 4.38 | 1252 5032 |
| 440603 | AL121733 | Hs.7299 | Novel human gene mapping to chomosome 1 | 4.38 | 3304 5610 |
| 423445 | NM_014324 | Hs.128749 | alpha-methylacyl-CoA racemase | 4.37 | 1746 5179 |
| 443242 | BE243910 | Hs.9082 | nucleoporin p54 | 4.37 | 3512 |
| 448360 | AL117560 | Hs.306352 | Homo sapiens mRNA; cDNA DKFZp566P2324 (f | 4.37 | 3959 |
| 431562 | AI884334 | Hs.11637 | ESTs | 4.37 | 2566 |
| 418565 | AK001529 | Hs.86149 | phosphoinositol 3-phosphate-binding prot | 4.37 | 1213 5019 |
| 416801 | X98834 | Hs.79971 | sal (Drosophila)-like 2 | 4.36 | 1024 |
| 434804 | AA649530 | | gb:ns44f05.s1 NCI_CGAP_Alv1 Homo sapiens | 4.36 | 2866 |
| 412123 | BE251328 | Hs.73291 | hypothetical protein FLJ10881 | 4.36 | 610 |
| 406081 | | | Target Exon | 4.36 | |
| 413599 | AJ006239 | Hs.75438 | quinoid dihydropteridine reductase | 4.35 | 4904 740 |
| 427712 | AI368024 | Hs.283696 | ESTs | 4.35 | 2187 |
| 423309 | BE006775 | Hs.126782 | sushi-repeat protein | 4.35 | 1736 |
| 452921 | AI694200 | | API5-like 1 | 4.35 | 4359 |
| 408908 | BE296227 | Hs.250822 | serine/threonine kinase 15 | 4.35 | 317 |
| 432148 | AW504912 | Hs.81907 | ESTs | 4.35 | 2636 |
| 434807 | AA364183 | Hs.323443 | hypothetical protein FLJ11806 | 4.35 | 2867 |
| 408056 | AA312329 | Hs.42331 | ephrin-A4 | 4.35 | 229 |
| 409132 | AJ224538 | Hs.50732 | protein kinase, AMP-activated, beta 2 no | 4.35 | 338 4813 |
| 408212 | AA297567 | Hs.43728 | hypothetical protein | 4.34 | 245 |
| 423176 | AA322771 | Hs.184864 | Homo sapiens, clone IMAGE:3162799, mRNA, | 4.34 | 1725 |
| 418372 | AA311833 | Hs.84318 | replication protein A1 (70 kD) | 4.34 | 1191 |
| 424668 | D83702 | Hs.151573 | cryptochrome 1 (photolyase-like) | 4.34 | 1869 5223 |
| 437228 | AL122099 | Hs.75066 | translin | 4.34 | 3046 |
| 428878 | AA436884 | Hs.48926 | ESTs | 4.33 | 2315 |
| 400370 | AF147075 | Hs.278686 | p53-responsive gene 3 | 4.33 | 14 |
| 439955 | AW203959 | Hs.149532 | ESTs | 4.33 | 3249 |
| 430200 | BE613337 | Hs.234896 | geminin | 4.32 | 2454 |
| 411450 | H49619 | Hs.127301 | ESTs | 4.32 | 557 |
| 426997 | BE620738 | Hs.173125 | peptidylprolyl isomerase F (cyclophilin | 4.32 | 2120 |
| 430791 | AA486293 | Hs.272068 | ESTs, Weakly similar to ALU3_HUMAN ALU S | 4.31 | 2513 |
| 438746 | AI885815 | Hs.184727 | Human melanoma-associated antigen p97 (m | 4.31 | 3164 |
| 443941 | AW016271 | Hs.134883 | ESTs | 4.31 | 3564 |
| 453323 | AF034102 | Hs.32951 | solute carrier family 29 (nucleoside tra | 4.31 | 4395 5775 |
| 439108 | AW163034 | Hs.6467 | synaptogyrin 3 | 4.31 | 3186 |
| 431214 | AA294921 | Hs.348024 | v-ral simian leukemia viral oncogene hom | 4.30 | 2541 |
| 431912 | AI660552 | | ESTs, Weakly similar to A56154 Abl subst | 4.30 | 2615 |
| 425580 | L11144 | Hs.1907 | galanin | 4.30 | 1979 5272 |
| 408161 | AW952912 | Hs.300383 | hypothetical protein MGC3032 | 4.30 | 240 |
| 409264 | NM_014937 | Hs.52463 | KIAA0966 protein | 4.30 | 356 4820 |
| 421288 | AI916563 | Hs.178499 | Homo sapiens cDNA:FLJ23117 fis, clone L | 4.30 | 1503 |
| 430526 | AF181862 | Hs.242407 | G protein-coupled receptor, family C, gr | 4.29 | 2493 5455 |
| 440426 | AI159800 | Hs.7181 | Homo sapiens cDNA FLJ13663 fis, clone PL | 4.29 | 3287 |
| 430691 | C14187 | Hs.157208 | aristaless-related homeobox protein ARX | 4.29 | 2505 |
| 455505 | AW970640 | Hs.309071 | ESTs | 4.29 | 751 |
| 413882 | AA132973 | Hs.184492 | ESTs | 4.29 | 761 |
| 405387 | | | NM_022170*:Homo sapiens Williams-Beuren | 4.29 | 4736 70 |
| 424005 | AB033041 | Hs.137507 | vang (van gogh, Drosophila)-like 2 | 4.29 | 1790 5193 |
| 420090 | AA220238 | Hs.94986 | ribonuclease P (38 kD) | 4.28 | 1383 |
| 417386 | AL037228 | Hs.82043 | D123 gene product | 4.28 | 1090 |
| 437866 | AA156781 | | metallothionein 1E (functional) | 4.28 | 3101 |
| 401558 | | | ENSP00000220478*:SECRETOGRANIN III. | 4.28 | |
| 430315 | NM_004293 | Hs.239147 | guanine deaminase | 4.28 | 2469 5444 |
| 432169 | Y00971 | Hs.2910 | phosphoribosyl pyrophosphate synthetase | 4.28 | 2637 5501 |
| 436869 | NM_014867 | Hs.5333 | KIAA0711 gene product | 4.28 | 3015 5581 |
| 410561 | BE540255 | Hs.6994 | Homo sapiens cDNA:FLJ22044 fis, clone H | 4.28 | 493 |
| 429162 | AK001250 | Hs.197642 | hypothetical protein FLJ10388 | 4.27 | 2334 5391 |
| 411968 | AI207410 | Hs.69280 | Homo sapiens, clone IMAGE:3636299, mRNA, | 4.27 | 595 |
| 422809 | AK001379 | Hs.121028 | hypothetical protein FLJ10549 | 4.27 | 1684 |
| 442619 | AA447492 | Hs.20183 | ESTs, Weakly similar to AF164793 1 prote | 4.27 | 3455 |
| 425242 | D13635 | Hs.155287 | KIAA0010 gene product | 4.27 | 1942 |
| 413413 | D82520 | | zinc finger protein 36 (KOX 18) | 4.27 | 717 |
| 416933 | BE561850 | Hs.80506 | small nuclear ribonucleoprotein polypept | 4.27 | 1040 |
| 420851 | AA281062 | Hs.29493 | hypothetical protein FLJ20142 | 4.27 | 1460 |
| 421508 | NM_004833 | Hs.105115 | absent in melanoma 2 | 4.27 | 1529 5111 |
| 446100 | AW967109 | Hs.13804 | hypothetical protein dJ462O23.2 | 4.27 | 3724 |
| 431578 | AB037759 | Hs.261587 | GCN2 elF2alpha kinase | 4.26 | 2570 5480 |
| 458187 | D56919 | Hs.265848 | myomegalin | 4.26 | 4614 |
| 425159 | NM_004341 | Hs.154868 | carbamoyl-phosphate synthetase 2, aspart | 4.26 | 1931 5249 |
| 439186 | AI697274 | Hs.105435 | GDP-mannose 4,6-dehydratase | 4.25 | 3191 |
| 408471 | NM_012317 | Hs.45231 | leucine zipper, down-regulated in cancer | 4.25 | 269 4797 |
| 451320 | AW118072 | | diacylglycerol kinase, zeta (104 kD) | 4.25 | 4209 |
| 420805 | L10333 | Hs.99947 | reticulon 1 | 4.25 | 1456 5088 |
| 424992 | AW290893 | Hs.96918 | Homo sapiens cDNA:FLJ21561 fis, clone C | 4.25 | 1905 |
| 443195 | BE148235 | Hs.193063 | Homo sapiens cDNA FLJ14201 fis, clone NT | 4.25 | 3506 |
| 458820 | BE552151 | Hs.108118 | hypothetical protein FLJ22474 | 4.25 | 4640 |
| 453455 | AA063553 | Hs.221931 | ESTs, Weakly similar to JC1087 RNA helic | 4.24 | 4408 |
| 448105 | AW591433 | Hs.298241 | Transmembrane protease, serine 3 | 4.24 | 3943 |
| 419591 | AF090900 | Hs.91393 | Homo sapiens cDNA:FLJ21887 fis, clone H | 4.24 | 1338 5054 |
| 410434 | AF051152 | Hs.63668 | toll-like receptor 2 | 4.24 | 478 4847 |
| 438186 | AA779910 | Hs.122128 | ESTs, Weakly similar to VMD2_HUMAN BESTR | 4.23 | 3125 |
| 452833 | BE559681 | Hs.30736 | KIAA0124 protein | 4.23 | 4351 |
| 450401 | AW959281 | Hs.8184 | ESTs | 4.23 | 4138 |
| 408075 | AA382881 | Hs.42409 | CGI-146 protein | 4.23 | 231 |
| 445139 | AB037848 | Hs.12365 | synaptotagmin XIII | 4.23 | 3656 5652 |
| 437158 | AW090198 | | KIAA1150 protein | 4.23 | 3039 |
| 431736 | AI912234 | Hs.3297 | ribosomal protein S27a | 4.22 | 2594 |
| 434203 | BE262677 | Hs.283558 | hypothetical protein PRO1855 | 4.22 | 2820 |
| 418182 | AW016405 | Hs.16648 | ESTs | 4.22 | 1167 |
| 428770 | AK001667 | Hs.193128 | hypothetical protein FLJ10805 | 4.22 | 2294 5374 |
| 427853 | AI569798 | Hs.98260 | ESTs | 4.22 | 2201 |
| 444151 | AW972917 | Hs.128749 | alpha-methylacyl-CoA racemase | 4.22 | 3577 |
| 424529 | M90656 | Hs.151393 | glutamate-cysteine ligase, catalytic sub | 4.22 | 1865 5221 |
| 445929 | AI089660 | Hs.323401 | dpy-30-like protein | 4.21 | 3714 |
| 452357 | AI638176 | Hs.283865 | ESTs | 4.21 | 4299 |
| 418216 | AA662240 | Hs.283099 | AF15q14 protein | 4.21 | 1171 |
| 440726 | AL050333 | Hs.306425 | DKFZP564B116 protein | 4.21 | 3315 |
| 408548 | AA055449 | Hs.63187 | ESTs, Weakly similar to ALUC_HUMAN !!!! | 4.20 | 278 |
| 418126 | T91451 | Hs.86538 | ESTs | 4.20 | 1163 |
| 434045 | AI065133 | Hs.152316 | hypothetical protein PR00971 | 4.20 | 2809 |
| 415752 | BE314524 | Hs.78776 | putative transmembrane protein | 4.20 | 948 |
| 419480 | BE536584 | Hs.122546 | hypothetical protein FLJ23017 | 4.20 | 1317 |
| 432626 | AA471098 | Hs.278544 | acetyl-Coenzyme A acetyltransferase 2 (a | 4.20 | 2687 |
| 416984 | H38765 | Hs.80706 | diaphorase (NADH/NADPH) (cytochrome b-5 | 4.19 | 1047 |
| 424720 | AA89907 | Hs.152292 | SWI/SNF related, matrix associated, acti | 4.19 | 1877 5228 |
| 429227 | AI961456 | Hs.21275 | hypothetical protein FLJ11011 | 4.19 | 2339 |
| 437250 | BE257342 | Hs.94576 | hypothetical protein MGC3062 | 4.19 | 3048 |
| 429412 | NM_006235 | Hs.2407 | POU domain, class 2, associating factor | 4.19 | 2365 5404 |
| 425867 | D60385 | Hs.12079 | calsyntenin-2 | 4.19 | 2007 |
| 438833 | BE612940 | Hs.88252 | ESTs | 4.18 | 3170 |
| 442064 | AI422867 | Hs.88594 | ESTs | 4.18 | 3392 |
| 440624 | AF017987 | Hs.7306 | secreted frizzled-related protein 1 | 4.18 | 3306 5611 |
| 415728 | X77337 | Hs.78713 | solute carrier family 25 (mitochondrial | 4.18 | 4953 946 |
| 430287 | AW182459 | Hs.125759 | ESTs, Weakly similar to LEU5_HUMAN LEUKE | 4.18 | 2460 |
| 439819 | BE246331 | Hs.98401 | Homo sapiens mRNA full length insert cDN | 4.18 | 3237 |
| 409151 | AA306105 | Hs.50785 | SEC22, vesicle trafficking protein (S. c | 4.18 | 341 |
| 400810 | | | NM_006560:Homo sapiens CUG triplet repea | 4.18 | 20 4691 |
| 447898 | AW969638 | Hs.112318 | 6.2 kd protein | 4.18 | 3921 |
| 448412 | AI219083 | Hs.42532 | ESTs, Moderately similar to ALU8_HUMAN A | 4.18 | 3967 |
| 411761 | AI733848 | Hs.71935 | putative zinc finger protein from EUROIM | 4.18 | 574 |
| 418506 | AA084248 | Hs.85339 | Unknown protein for MGC:29643 (formerly | 4.17 | 1208 |
| 438054 | AA776626 | Hs.169309 | ESTs | 4.17 | 3115 |
| 407756 | AA116021 | Hs.38260 | ubiquitin specific protease 18 | 4.16 | 191 |
| 442073 | AW973443 | Hs.8086 | RNA (guanine-7-) methyltransferase | 4.16 | 3396 |
| 426227 | U67058 | Hs.154299 | Human proteinase activated receptor-2 mR | 4.16 | 2041 |
| 435513 | AW404075 | Hs.42785 | DC11 protein | 4.16 | 2922 |
| 458513 | AI138322 | Hs.154894 | ESTs | 4.16 | 4627 |
| 419373 | NM_003244 | Hs.90077 | TG-interacting factor (TALE family homeo | 4.16 | 1307 5045 |
| 452862 | AW378065 | Hs.8687 | ADAMTS2 (a disintegrin-like and metallo | 4.15 | 4354 |
| 428465 | AW970976 | Hs.293653 | ESTs | 4.15 | 2260 |
| 417266 | AW978515 | Hs.131915 | KIAA0863 protein | 4.15 | 1075 |
| 415786 | AW419196 | Hs.257924 | hypothetical protein FLJ13782 | 4.15 | 951 |
| 432878 | BE386490 | Hs.279663 | Pirin | 4.15 | 2707 |
| 412122 | AW852707 | | G-rich RNA sequence binding factor 1 | 4.15 | 609 |
| 425116 | AU076686 | Hs.154668 | KIAA0391 gene product | 4.13 | 1922 |
| 433023 | AW864793 | | thrombospondin 1 | 4.13 | 2725 |
| 421808 | AK000157 | Hs.108502 | hypothetical protein FLJ20150 | 4.13 | 1565 5122 |
| 432229 | AW290976 | Hs.143587 | ESTs | 4.13 | 2646 |
| 411145 | BE439553 | Hs.12329 | Homo sapiens, clone IMAGE:4098694, mRNA, | 4.13 | 537 |
| 442607 | AA507576 | Hs.288361 | Homo sapiens cDNA:FLJ22696 fis, clone H | 4.12 | 3452 |
| 453751 | R36762 | Hs.101282 | Homo sapiens cDNA:FLJ21238 fis, clone C | 4.12 | 4428 |
| 437108 | AA434054 | Hs.80624 | hypothetical protein MGC2560 | 4.12 | 3034 |
| 426784 | U03749 | Hs.172216 | chromogranin A (parathyroid secretory pr | 4.11 | 2098 5319 |
| 447541 | AK000288 | Hs.18800 | hypothetical protein FLJ20281 | 4.11 | 3877 5691 |
| 433077 | AA314262 | Hs.289008 | YDD19 protein | 4.11 | 2732 |
| 416640 | BE262478 | Hs.79404 | neuron-specific protein | 4.11 | 1009 |
| 407634 | AW016569 | Hs.136414 | UDP-GlcNAc:betaGal beta-1,3-N-acetylgluc | 4.11 | 174 |
| 441128 | AA570256 | | ESTs, Weakly similar to T23273 hypotheti | 4.10 | 3334 |
| 408031 | AA081395 | Hs.42173 | Homo sapiens cDNA FLJ10366 fis, clone NT | 4.10 | 225 |
| 407839 | AA045144 | Hs.161566 | ESTs | 4.10 | 205 |
| 425001 | U55184 | Hs.154145 | hypothetical protein FLJ1585 | 4.10 | 1908 5241 |
| 449188 | AW072939 | Hs.347187 | myotubularin related protein 1 | 4.10 | 4043 |
| 434941 | AW073202 | Hs.334825 | Homo sapiens cDNA FLJ14752 fis, clone NT | 4.09 | 2881 |
| 409439 | AW390511 | Hs.288862 | Homo sapiens cDNA: FLJ21260 fis, clone C | 4.09 | 371 |
| 424243 | AI949359 | Hs.143600 | ESTs, Highly similar to cis Golgi-locali | 4.09 | 1818 |
| 439606 | W79123 | Hs.58561 | G protein-coupled receptor 87 | 4.08 | 3224 |
| 407999 | AI126271 | Hs.49433 | ESTs, Weakly similar to YZ28_HUMAN HYPOT | 4.08 | 222 |
| 414962 | AF273304 | Hs.235376 | XPMC2 protein | 4.08 | 4936 896 |
| 452512 | AW363486 | Hs.337635 | ESTs | 4.08 | 4319 |
| 429024 | AI652297 | Hs.119302 | complement-c1q tumor necrosis factor-rel | 4.07 | 2326 |
| 434288 | AW189075 | Hs.116265 | fibrillin3 | 4.07 | 2826 |
| 438472 | AW974907 | Hs.86228 | TRIAD3 protein | 4.07 | 3142 |
| 449543 | AF070632 | Hs.23729 | Homo sapiens clone 24405 mRNA sequence | 4.07 | 4066 |
| 439541 | AW970853 | Hs.336214 | ESTs | 4.06 | 3213 |
| 435803 | Z44194 | Hs.4994 | transducer of ERBB2, 2 | 4.06 | 2946 |
| 429250 | H56585 | Hs.198308 | tryptophan rich basic protein | 4.06 | 2343 |
| 437994 | U92012 | Hs.251659 | ESTs, Weakly similar to mariner transpos | 4.06 | 3114 |
| 434725 | AK000796 | Hs.4104 | hypothetical protein | 4.06 | 2863 5553 |
| 440006 | AK000517 | Hs.6844 | NALP2 protein; PYRIN-Containing APAF1-ti | 4.05 | 3252 5601 |
| 424259 | AK001776 | Hs.143954 | hypothetical protein FLJ10914 | 4.05 | 1822 5207 |
| 426572 | AB037783 | Hs.170623 | hypothetical protein FLJ11183 | 4.05 | 2079 5310 |
| 434517 | AA635690 | Hs.337251 | hypothetical protein MGC2487 | 4.05 | 2845 |
| 425397 | J04088 | Hs.156346 | topoisomerase (DNA)∥alpha (170 kD) | 4.05 | 1959 5261 |
| 434033 | AI631749 | Hs.156616 | ESTs, Weakly similar to alternatively sp | 4.05 | 2807 |
| 431341 | AA307211 | Hs.251531 | proteasome (prosome, macropain) subunit, | 4.05 | 2549 |
| 427699 | AW965076 | Hs.180378 | hypothetical protein 669 | 4.04 | 2184 |
| 422765 | AW409701 | Hs.1578 | baculoviral IAP repeat-containing 5 (sur | 4.04 | 1680 |
| 452408 | AA306477 | Hs.29379 | hypothetical protein FLJ10687 | 4.04 | 4304 |
| 412708 | R26830 | Hs.106137 | ESTs, Weakly similar to CGHU7L collagen | 4.04 | 661 |
| 424232 | AB015982 | Hs.143460 | protein kinase C, nu | 4.04 | 1816 5204 |
| 432945 | AL043683 | Hs.8173 | hypothetical protein FLJ10803 | 4.04 | 2715 |
| 430132 | AA204686 | Hs.234149 | hypothetical protein FLJ20647 | 4.04 | 2446 |
| 431585 | BE242803 | Hs.262823 | hypothetical protein FLJ10326 | 4.04 | 2572 |
| 410660 | AI061118 | Hs.65328 | Fanconi anemia, complementation group F | 4.04 | 502 |
| 414013 | AA766605 | Hs.47099 | hypothetical protein FLJ21212 | 4.04 | 774 |
| 414696 | AF002020 | Hs.76918 | Niemann-Pick disease, type C1 | 4.04 | 4924 864 |
| 419638 | N46504 | Hs.91747 | profilin 2 | 4.04 | 1341 |
| 446487 | AA195526 | Hs.44625 | Rad50-interacting protein 1 | 4.03 | 3754 |
| 419749 | X73608 | Hs.93029 | sparc/osteonectin, cwcv and kazal-like d | 4.03 | 1357 5057 |
| 444864 | AW965446 | Hs.81907 | ESTs, Weakly similar to T26501 hypotheti | 4.03 | 3635 |
| 445921 | AW015211 | Hs.146181 | ESTs | 4.03 | 3712 |
| 422005 | BE266556 | Hs.110702 | Homo sapiens mRNA; cDNA DKFZp761E212 (fr | 4.03 | 1592 |
| 406922 | S70284 | Hs.119597 | gb:stearoyl-CoA desaturase [human, adipo | 4.03 | 109 4755 |
| 433149 | BE257672 | Hs.42949 | hypothetical protein HES6 | 4.02 | 2740 |
| 421182 | AA284655 | Hs.104480 | ESTs | 4.02 | 1487 |
| 417691 | AU076610 | Hs.82399 | low density lipoprotein receptor defect | 4.02 | 1112 |
| 451253 | H48299 | Hs.26126 | claudin 10 | 4.02 | 4204 |
| 446950 | AA305800 | Hs.5672 | hypothetical protein AF140225 | 4.01 | 3806 |
| 435020 | AW505076 | Hs.301855 | DiGeorge syndrome critical region gene 8 | 4.01 | 2888 |
| 432278 | AL137506 | Hs.274256 | hypothetical protein FLJ23563 | 4.01 | 2650 5504 |
| 452066 | AA772149 | Hs.16979 | ESTs, Weakly similar to A43932 mucin 2 p | 4.01 | 4267 |
| 444700 | NM_003645 | Hs.11729 | fatty-acid-Coenzyme A ligase, very long- | 4.01 | 3620 5642 |
| 417777 | AI823763 | Hs.7055 | ESTs, Weakly similar to I78885 serine/th | 4.00 | 1122 |
| 441647 | AA534210 | Hs.285280 | Homo sapiens cDNA:FLJ22096 fis, clone H | 4.00 | 3365 |
| 453063 | W47196 | Hs.166172 | aryl hydrocarbon receptor nuclear transl | 4.00 | 4371 |
| 432834 | F06459 | Hs.289113 | cytochrome b5 reductase 1 (B5R.1) | 4.00 | 2703 |
| 419457 | AA243146 | Hs.209334 | ESTs, Moderately similar to S23A_HUMAN P | 4.00 | 1315 |
| 452253 | AA928891 | Hs.28608 | Homo sapiens cDNA:FLJ22115 fis, clone H | 4.00 | 4288 |

Pkey: Unique Eos probeset identifier number
ExAccn: Exemplar Accession number, Genbank accession number
UniGeneID: UniGene number
UniGene Title: UniGene gene title
R1: 90th percentile of lung metastases to the brain Als divided by the 90th percentile of normal lung Als, where the minimum in the numerator and denominator was set to 20.
SEQ ID NO(s): SEQ ID number(s) for nucleic acid and protein sequences associated with table entry.

[0353] TABLE 6B

| Pkey | CAT number | Accession |
|---|---|---|
| 449230 | 6182_6 | BC006329 AK026224 BG105365 AI472084 AW074277 AI743908 BM309990 BI850432 AI094365 AI539568 AW779999 |
| | | AI261365 AA988975 AI436272 AI559886 BI710742 AA988508 AA036678 AI867147 AW518513 AI620019 BE645777 AI801919 AW205320 AI457722 BF061996 |
| | | BF061798 AA233854 AA232795 AA516294 AA830561 R74220 BG768337 AW392972 BE764979 BE257665 |
| 429228 | 215430_1 | BG676155 BM009591 AI479075 AI025794 AI017967 AA448270 BE466812 AA853422 AI392649 BG952034 AA513384 BF840124 BE714620 AW969605 AI553633 |
| 447329 | 9170_1 | BC001573 AK074197 AW967044 AW360965 AW612048 AI765501 AA112034 BI859391 BI334670 W63553 AV706135 AW024203 BI194441 AV655141 AA316041 BE280583 |
| | | BG428780 BE267060 AV648926 AA317168 BI222294 BG437688 BE709273 AI951240 AI611162 AW970792 H89338 BE543309 AL036038 R26941 |
| | | BI765176 AA209487 AA111975 AA086463 AW192209 AW025245 BF511894 AW264490 AW014985 AA947336 F15843 BI335083 |
| | | AA563626 BE546579 AW470009 AA083693 BE090517 BF970294 BG427898 BE541527 |
| 428342 | 6712_1 | AK056315 AI015524 AA724079 BI713619 AI377728 AW293682 AI928140 AI092404 AI085630 AA731340 BM469629 AW968804 AA425658 AI356361 AI923640 AW070509 |
| | | AA769094 BF446026 AW118719 AI332765 AW500888 AW576556 AI859571 AW499664 AW614573 AW629495 AW505314 W74704 AI521500 AL042095 AA609309 |
| | | AA761319 AI381489 H45700 AA761333 AW265424 AA909524 AA635311 AA649040 AI392620 Z40708 AI985564 AW263513 AA913892 AI693486 AW263502 |
| | | AI806164 AW291137 BI061872 BI059498 AA134476 AW084888 AA036967 AW370823 T55263 BI002756 AA489664 BF827261 W74741 BF963166 |
| 412446 | 63467_1 | BC021735 AI669212 AL120184 AI769949 BE701002 BE184363 BE819031 BG702238 BF090049 BF963318 BF961912 BF943013 |
| | | AA934514 AA151245 BF960659 AA987907 Z41449 BF908059 BF908053 BF908049 BE699424 BF908060 BF962832 BF952020 BF963134 |
| | | BI035538 BF908052 BF908057 BF090026 BF943158 AI632924 BF512340 BF952021 BF960776 BF943437 BF942847 AI768015 F09778 |
| | | F04816 F02721 AA102645 AI633838 AA617929 BF947001 BI035448 BE935876 AW890837 AW898604 BF957405 BF963433 BG704815 |
| 412636 | 1438_1 | M77830 NM_004415 AF139065 BG681115 BG740377 BI712964 BG000656 AA128470 BI438324 H27408 BE931630 BE167165 AW370827 |
| | | AW370813 J05211 BG698865 BG740734 BG680618 BG739778 BI765807 BM353403 BM353248 AW177784 AW205789 AW951576 |
| | | AW848592 BE182164 BF149266 BE940187 BI060445 BI060444 BF350983 BE720095 BE720069 BE715154 BE082584 BE082576 |
| | | BE004047 AA857316 BI039774 BE713818 BE713548 AW170253 BE160433 BI039775 AW886475 BM462504 BE931734 BF149264 |
| | | AA340777 BF381183 BG621737 AU127260 AW364859 BF993352 BG223489 BE819009 BF381184 BE715956 R58704 AA852212 |
| | | AW366566 BI090358 BF087707 BE819046 BE819005 AA377127 BE073467 BE819069 BE819048 BI036306 BG990973 BI040954 |
| | | BF919911 AU140155 AI951766 AI434518 AW804674 BF752969 BE837009 BE925826 BF149265 AW995615 BE814264 BI039782 |
| | | AU140407 BE144243 BE709863 BF985642 BE001923 BF933510 AW265328 BG436319 BE182166 AW365175 AW847688 BE818280 |
| | | AW177933 BF873679 AW178000 BE082526 BF476866 BF086994 BF592276 BE082507 BE082514 BE082505 BF873693 AW068840 |
| | | AW847678 BF804153 AW365157 BE813930 BE002030 AW365153 BE184941 BF749421 BE184920 BF839562 BE184933 BF842254 |
| | | BE698470 BE931048 BF999889 BF368816 BE184924 BE159646 BE714632 BE184948 BG986845 AA131128 AA099891 W39488 C04715 |
| | | BF096124 BE865341 AW799304 AL603116 BE149760 BE705967 BE705966 BE705968 AW848723 AW376699 AW376817 AW376697 |
| | | BG005097 BF751115 BE696084 AW848371 AW376782 AW848789 AW849074 AW361413 BF927725 BF094211 AW997139 BE865474 |
| | | BE185187 BE156621 BE715089 BE713297 BE713298 BE179915 AW799309 BF872345 BF088676 BE705939 AW752599 BG005197 |
| | | BF350086 BE715196 BE715155 BF752396 BF093817 BF831190 BF752409 BE006561 BG959922 BF094833 BF094748 BF094583 |
| | | AW377699 AW607238 BE082519 AW377700 BF349467 AI190590 AI554403 AI392926 AU158477 BI467252 AU159919 AI760816 BF082516 |
| | | AI439101 AA451923 AI340326 AI590975 BI791553 AI700963 AI142882 AA039975 AA946936 AA644381 BM314884 AA702424 AI417612 |
| | | AW190555 AI220573 AI304772 AI270345 AI627383 AA552300 AI911702 AW166807 AI346078 W95070 AA149191 AA026864 AI830049 |
| | | AW780435 AI078449 AI819984 AI858282 BI468588 AI860584 AI025932 AA026047 AA703232 AA658154 AA515500 AW192085 AA918281 |
| | | T77861 AI927207 AI205263 BF082491 AW021347 AI568096 BE939862 AA088866 D12062 AA056527 AA782109 W19287 W02156 |
| | | AW150038 AA022701 T87181 H44405 AI910434 BF082513 AI494069 AI270027 AI635878 AA128330 BG681425 BE706078 R20904 |
| | | BG680059 BG676647 BF764409 AA026654 AV745530 BI762796 BG287391 AW798780 BE706045 BE926470 AW799118 BF087996 |
| | | BE002273 AW879451 AI571075 BE067786 AV721320 AI022862 N29754 C03378 N84767 AA131077 H30146 BE714290 AI686869 |
| | | AI568892 AI915596 AW105614 AI887258 AI538577 BE926474 BE067737 BG319486 AA247685 AW798883 AW103521 BF989173 |
| | | AW860878 BE939707 BE185750 BE714064 BE713903 BE713868 BE713763 BG950164 BE713810 AW365151 BG955489 BE005272 |
| | | BF915937 AW365148 AI905927 BF992780 AW853812 BG954443 BI770853 BG679406 BG740832 BG681087 BG698430 AA455100 |
| | | T87267 BE696209 BE696210 BI089483 BE006273 BE872225 AW391912 BE925515 BG677012 BG741970 AA026480 BE705999 |
| | | BG677157 BE009090 BG681378 BE712291 BG961498 BG678984 BI040941 AA337270 AW384371 AW847442 BI058659 BE813665 |
| | | W95048 W25458 AW177786 AA025851 BE931733 BF154837 BG949393 BE714441 AW996245 BE711801 AI284090 BE064323 BE719390 |
| | | BE940148 BG991212 BF375714 BF349522 BG996267 T48793 BI013292 BE001925 AW365156 AW365154 AW606653 BF763109 |
| | | BE931637 BE167181 BE713879 BF354008 BF678726 H90899 AW365145 W38382 AI498487 |
| 449349 | 852_3 | BG679689 AW856638 BM016319 BE327123 AW772128 BE693337 BE938262 BG013928 BF892774 BF894765 BF892588 BF890995 |
| | | BE155056 BE153569 AI934407 BE672538 AW204203 AA778306 BE502974 AI718504 AA778312 AW008224 AW299732 AI911561 |
| | | AI867457 AI521962 AI640173 AI823832 AI288888 BE467960 AI934441 AA483527 AW612103 AI802712 AW342106 AI580299 AW083293 |
| | | AI700874 AW469932 AI583726 AW302136 BE327360 AW614404 C02300 AA934834 F29737 AI262050 AA934619 AA535965 BF196507 |
| | | AA393480 BF086615 AI825386 AA009773 BI333272 T93614 AW770207 BF766665 T64641 W92713 R94110 T89897 BF086603 T93659 |
| | | AA001207 BE539257 BE541430 BE160783 BE155304 BE155454 BF891405 BF762818 |
| 451807 | 17758_2 | BM479185 AL552795 AL577722 BF038888 BM127617 BF510346 AW450652 AA865478 AW449519 BM127314 AI806539 AW449522 AA993634 AI827626 AA904788 |
| 446873 | 15731_1 | BC016767 Z30093 NM_001516 BI753904 AL555563 AL598882 BG706296 BG723901 AL600911 AW949486 AL602675 AL600169 AL600111 AI373329 |
| | | BF149149 AU099109 AL578036 AA410532 AA521208 BI018894 BI333338 AW269273 N79350 AW954400 AI760772 AA765916 AW300373 AW628851 AW505118 AA506136 |
| | | AW779373 AI675026 BE674159 AI241579 N51870 AI632936 AI796901 AI620962 AA876979 AA886127 AA934448 H58689 AA373345 N78420 AA282406 N98953 N22575 |
| | | N62381 AA805377 AV718946 AI421009 D20327 AW518433 AI554439 BI027833 BG613441 BG573433 N66669 N62701 |
| 450377 | 12109_1 | AB033091 AL520743 BE811813 N53332 N99716 AL561910 AA280655 BE710392 AV705100 AW293978 AW444556 AA281459 AI679751 |
| | | AI873695 BG700891 BI553517 R80518 BG779771 BG534451 AA479402 AW961580 BF061430 AI857643 AI768486 AW512118 AA479302 |
| | | AW770384 AW072470 AI041596 AI049699 AW592865 AA976261 BE879747 BG114119 AW183811 AA909938 BF571621 BF350794 |
| | | BF351375 BE925699 AL050294 BC010371 BF982270 AL042656 BF095732 AW812618 BF095731 BG212397 BF678765 BI038602 |
| | | BG388664 AW675337 BG289398 BE939598 AW805570 AA527097 AW150540 AI693720 AA743364 AI915793 N48185 AI573107 AA043474 |
| | | AI351615 AI969490 AI910763 R50866 AI699181 N73808 H08164 |
| 451752 | 10408_5 | AB032997 AI141678 AW978722 BE467119 AI761408 BF727385 AW237035 AI934521 BF436248 AI479668 Z40632 AA832081 AW295901 BF057835 BE465977 |
| | | AI621269 BE465983 BF756369 N74056 AI817896 AA716567 AA934774 H62600 H09497 BF943762 BE395335 BE883333 |
| 400247 | 2764_1 | BC022339 BC009610 BC010537 X79805 NM_006713 U12979 BM467814 BM450743 AU132951 AU137129 BG493425 AV758819 |
| | | BG708412 BG705885 BG702217 AV716638 BG777009 BI545689 BI552153 BM476712 BG770858 BG527656 BG528277 BG391388 |
| | | AV716861 BI602926 BG290073 BI667399 BM451469 BI667173 BI602139 BG532171 BI669216 BI544727 BG721852 AV716503 AV701327 |
| | | BM090738 BI492000 AI308856 BI544904 AL599813 AV715829 AV716505 AV714587 AV717902 BF668072 AV716385 BI461927 BM090954 |
| | | AV717826 BG503676 AV647719 BG501392 BG428433 BE895629 BM313117 AW021050 BG435032 BM152910 AA313503 AA872377 |
| | | BG574714 AV712054 AV732696 AA252476 AV712759 AL599643 BE790872 BG654930 W73337 AW675377 AV760376 AV725139 |
| | | AV716379 AA887165 BE830003 AW023796 AL599291 AI902948 BG944042 F00781 AA352483 BG217897 N33888 AW581924 BG654730 |
| | | D31410 AA353088 D31288 AA295029 H95170 BE935104 AU139980 BG772963 BG776470 BG532512 BG105449 BI545421 AV715456 |
| | | AW386083 BG699714 AL535832 AL514940 BG190861 BG210593 AW999254 H95138 AA353863 BE764809 N50375 BE091363 BG701255 |
| | | BI860846 BI832485 BG168150 BG028647 BE546301 BG900321 BI909737 BG702363 BG614141 BG611137 BG700121 BF031492 N85802 |
| | | AV715940 N51590 BG993478 BE172016 AW893622 |
| 444172 | 49300_2 | BF526827 AA513594 AL515291 AV648373 AV648176 AA916789 BF002906 AW469960 BE466943 AI367749 AI559715 BF431260 AA937968 AI422252 AI288937 |
| | | BF962778 AA909144 BF960004 BE671534 AI271719 BF925335 BE669504 BF433431 BF924838 AI218062 AW960577 AV722716 BI859067 BF944964 |
| | | BE147740 BF938993 |
| 414883 | 8371_2 | AF274943 BG494894 AI719075 AA908783 AI935150 AI422691 AA910644 AA583187 BM272167 AI828996 AA527373 AW972459 AI831360 |
| | | AA772418 AI033892 AA100926 AU154749 AI459432 AI423513 AI094597 AA740817 AI991988 AI090262 AI312104 BI256707 AA459522 |
| | | AA416871 AI075239 AI339996 AA701623 AI139549 AI336880 AA633648 AI989380 AI362835 AA399239 AI146955 BF514270 N92892 |
| | | AI348243 AI278887 AA459292 AI494230 BF507531 AI492600 AA962596 AW613002 AA293140 AA235549 BF108854 AA954344 N49682 |
| | | AI457100 AW589407 AW300758 BE220715 BE220698 BE569091 BM009647 BF900351 AI537692 AI203723 AI857576 AA584410 |
| | | AW371667 BM172363 |
| 412652 | 18858_2 | AI801777 BE677762 AW008210 AW009441 BE350994 BE207949 AI091475 AI802774 AI827533 AI075363 AI659979 AA687855 AI078125 |
| | | AI090285 AA670058 AA602411 AA683472 AI436058 AA612826 AI038932 BG057726 AI167355 BF449023 AI289476 AW074381 BF972912 |
| | | AI991780 AA889119 AI537472 Z39730 AI868953 AI192337 BE812978 BE812939 AA115248 H99006 AI915784 F08973 T16748 D20468 |
| | | AA609899 BF081234 AA115336 BE812876 BE812972 BE812982 BE813006 BE813019 R43883 BE812981 |
| 419631 | 2743_1 | BC022323 AF204171 NM_022361 BM264431 BE670789 AW188117 AI025298 AA861832 H84897 AI382294 AA662874 AW993380 |
| | | BE813742 H84368 AI188074 N20482 H84369 |
| 422150 | 782_1 | BI086421 BF059136 AW003898 BF446659 AI632891 AI628067 AI703179 AI961149 BF111022 AW614154 BE674215 AA687350 AA779426 BF591963 AW243344 AI356530 |
| | | AI492508 AI694049 AI090422 AA465307 AI273387 BE674625 AW271971 AA969153 AW468593 AA984014 AI817491 AA970258 AI914450 AI018697 AW577591 |
| | | AW577616 AA382101 AW954455 AI867266 AI707995 AI337384 BF208406 BF037100 BF223433 BF195517 BE673984 BF224124 BE813387 BG036579 BI553906 |
| | | AA304995 AW361269 AW754160 AW361276 AW361271 AI867118 AW805555 AW361284 AW954458 AW958551 BG681507 H79011 AW205696 AW134957 AA747667 |
| | | AW753296 BF939060 AW958549 BF910827 BG573750 BG168639 |
| 418304 | 1093209_1 | BE883520 BI057842 AA215702 AA215703 AA368006 BE006876 BE066555 |
| 437810 | 6139_1 | NM_016617 AF208844 Z70222 AL515797 BI666750 BI602334 BG717532 AL554429 BI545991 AW847749 BG393649 AV757080 AI373461 |
| | | AA315780 AA301659 AI393910 AI762600 AA321522 AA331540 AF305827 BG924826 AI720715 AI079860 AA677539 AA707143 AW196875 |
| | | AI269926 AI929790 BE246362 AI753224 AI687566 AI022486 AA101081 BM150935 AI591063 AI566293 AW189841 AW515306 AW028380 |
| | | AA766135 AI084005 W02557 AI018470 AA972561 AI371710 AA954779 AA746269 AA747909 AW020207 BI491245 H89948 AI041765 |
| | | AV652999 AA889510 AW243602 AA628783 AI866249 AA736845 AL515796 BF970987 AW604215 AW604214 R53127 AA937309 |
| | | AA815183 AA976070 AA736764 AW473513 BF591731 H88829 AL566858 BI088846 R73732 BF679743 BG113547 BF243416 |
| 412452 | 71091_1 | BE796667 BF330981 BE394193 Z45547 BG490525 F35734 AA130708 AA577072 AA446587 AA215665 AA978209 BG740729 BG746810 BE298184 AI356291 AI671975 |
| | | AI818924 AV715722 AI078381 BI142391 AI201085 AI198283 AI077572 AI694848 AW016425 BM456416 AI277223 AW771476 F26140 AA102778 AW025780 |
| | | R44726 AA761079 AI581346 AI991909 BM005939 BE537999 BG469717 AA114156 BF437200 BE774942 |
| 453454 | 2736_1 | BC001588 BC007424 AF016369 NM_004697 BI756186 BE257019 BG500792 BI862776 AL121371 BG574833 AA703250 AA179511 |
| | | AW052006 AI280150 AI914000 AI358319 AI081204 AI082594 AA992449 AI470821 AI655744 AW237529 AA678858 AI984430 BF433055 |
| | | BE467594 BE467573 AA035630 AI289987 AI184802 AI681391 AW592416 AI138377 AI139266 AA961714 AI800163 AA418751 AW451928 |
| | | AA668676 AI273444 AI494387 BE046912 AI276555 BF196021 AA700055 AA609305 AA772596 AI635758 AI635749 H95459 AW610290 |
| | | BE464994 AA527136 BF374802 AI800175 AW195227 AI189676 BF802049 AL513632 AL554911 AL538845 BE297273 AA315321 |
| | | BM451920 BE269268 BE292835 BE018128 BG755713 BM041095 BG677009 AL039691 BF995709 BE735586 BE296453 BG393609 |
| | | BG824453 AL567522 AI745257 AW388641 AW301265 AI141144 AW029280 AU149362 AU152328 AA418960 AL121009 AI890398 |
| | | AL528748 H13050 T47086 BI000575 BF334914 BF109661 R44450 H13259 T47087 AW388646 BF305834 AL577515 BM041600 BE889299 |
| | | BF239768 |
| 442092 | 22756_2 | BM449821 BM069895 BM023170 AW025563 BG152606 BM023452 AI862106 BG959957 |
| 419175 | 35068_1 | AB018322 BC012480 BI524873 AW665554 AI934469 AI479916 BF096179 BF096162 BF096132 AA744972 AI951988 AI858339 BE076331 |
| | | AA886998 AI570585 AI916688 AI678811 AI693109 AI308135 AA669046 AA961064 AI018062 H80618 BE221942 R52609 AI915164 |
| | | AA365626 Z44671 BI052776 BF882486 BG286184 AI589558 AA931663 AA534979 AI275392 AI273455 R52553 AA829920 H80652 |
| | | AA360728 F10618 AW953666 AW176773 H85527 AA765570 AA081927 BF093262 BG743753 AL037576 AA534314 BE814964 BE973713 |
| | | N49493 BE006634 BE006630 AW270037 AA234765 AI334004 BF057179 AI857450 AI341191 AI434143 AI917449 AW517207 AA255424 |
| | | AW008334 AA847572 AA994211 AA861901 AA581873 AI580157 AI364363 AW242357 AW235291 N55645 AA319869 R36911 AA256551 |
| | | AW044188 AI203159 N49403 F02090 AI187299 AI609644 Z40516 AW952314 |
| 411605 | 10026_3 | BG256892 H10532 N46614 R52610 AW977696 BM460488 W56819 BI042183 BG977498 BE767451 BF870009 BG477472 R61137 R14274 |
| | | R20259 R09686 BI838226 BF034269 AA429173 BE741829 AW867495 AI123683 AW006831 BE831162 AW452753 AV742717 W86152 |
| | | BF115102 AI633815 BF921562 AA094230 BE092587 W86151 AA526153 AI672156 BF914496 R12579 BF852352 AA699780 T57386 |
| | | BF903022 R09933 AA678298 |
| 424036 | 6226_1 | NM_033445 BC001193 AI885781 BF794032 AA476620 AA810906 AA810905 AI291244 AI885097 AI359708 AI335629 H97396 AI344589 AA300377 |
| | | AA457566 AW771833 BE465621 AI364068 |
| | | AI364452 AI648505 AI918342 AI928670 AA886580 AL531029 AA886344 AI186419 BG329096 BM045465 AL531028 BG437151 BE868021 AA179427 |
| 432908 | 452541_1 | AF150424 AI861896 AA570057 AV738855 |
| 447197 | 2176805_1 | R36075 R36167 AI366546 |
| 443695 | 20416_12 | BE535598 AW204099 AW301249 AA609749 BF917914 AA775742 AV646137 AV646389 AA314747 |
| 430935 | 15297_3 | BC017923 AA789302 AW466994 BF513878 AI819642 AI184913 AW469044 AI220572 AW072916 AI280239 AI473611 AW841126 D60937 AA489195 N59350 AA693435 |
| | | BG531204 AA484243 AW514092 |
| 441623 | 3362_1 | BC022413 BE395396 BF754175 AA506621 BE706665 BE706678 AA723159 BE153169 BE706729 BE706558 BE153312 BE706706 |
| | | AW371853 AW371849 BE153241 BC017410 AI337912 AI090244 AW090300 BE219837 AI623661 BE501576 BE501734 AI742232 |
| | | AI023964 AI458424 AA975373 AI288904 AI984583 AA890325 N32562 AI358102 AW241694 AI038448 AI672071 AI018389 AA576391 |
| | | AA977874 AW189392 W37448 AA612894 AI277548 H89551 AI699774 H89365 AA315805 AW579186 BC014584 BC014581 AW780125 |
| | | AI672414 BE328145 AW600919 BF031306 AW172758 BE708322 AA345675 BE875779 H28241 H25318 BF540913 BG179688 BF110202 |
| | | AA528775 W37573 BE041644 AW366504 BM129522 BM129822 AI122760 BE718200 AW887496 AA149420 BE706307 BE539395 |
| | | BE748765 AI373653 R75904 BF979185 BF691393 BG495595 BI094458 BE706702 BG496559 BF248373 BG494800 |
| 407604 | 43771_1 | AK074129 AL138071 AI806793 AI453544 AI084616 BF062435 BE672932 AI828296 BF062464 AI803443 AI264326 AI280956 AI743547 |
| | | AW295227 AW139967 AI972561 AI863570 AW062752 AW062756 AW062753 AW176904 AW062755 AW062750 AW062749 AW176886 |
| | | AI751694 BG251391 AA043621 W30872 BI524827 N94581 AI084614 AA776976 AI377572 AI751695 AI016576 AW439994 AW194255 |
| | | AW627763 AA668249 AI079870 AW022524 AI968540 AI248360 AA702490 AA043262 AA631511 AW176883 AW751767 AW176887 |
| | | AW062748 AW062745 AW176862 AW176815 AW176814 AW176846 AW176841 AW176871 AW176874 AW176819 AI927437 AW191962 |
| | | R36548 AA853713 AW196059 AA618567 AW176881 AW062754 AW062751 AW062746 AW176888 AW751772 AW176859 AW751765 |
| | | AW751762 AW176833 AW176873 AW751745 AA694513 AA780815 AW176857 AW176834 AW176839 AW751771 AW176878 AW176843 |
| | | AW176842 AW751755 AW176847 AW176812 AW176830 AW176849 AW176844 AW176877 AW751757 AW176850 AW176851 AW751758 |
| | | AW751746 AW176858 AW176853 AW751766 AW176845 AW176872 AW176840 AW176876 AW176852 AW751754 AW176836 AW176856 |
| | | AW751773 AW751760 AW751751 AL138070 AA639738 AL602588 AA853712 AA317570 R38469 AW291569 |
| 458748 | 701190_1 | AI381530 BG942599 AW270510 AW265104 |
| 449444 | 2735_1 | U59185 NM_004696 AV734324 AI245349 AA369517 H88760 D79128 AA970406 H01059 H88761 H03446 BG620383 AU135008 AU136895 |
| | | AU158158 AU155762 R73608 R65751 R23756 N74630 AW078687 BE439761 BE786351 R68994 BE785867 AW297502 AW297553 BG431545 AW814843 BF382644 BG429539 |
| | | BE929862 BF811258 |
| 437834 | 294580_1 | BG110129 AW749287 BE535498 AW749299 AW749293 AW749302 AW749298 AW749291 AW749294 AW749289 AW749288 AW749296 AA769294 AW749297 |
| | | AW749295 AW749292 BE002573 |
| 430539 | 31268_1 | AK001489 AU129447 BF959274 BG565452 AI245327 AU116848 BF358559 BF358554 BF358570 BG678119 AL515852 AU154607 |
| | | AI357567 AW874359 AI122554 AA406478 AI091013 AI866679 AI686163 AA662158 AA911580 D31095 AI302576 BF588761 AU151560 |
| | | AU143828 AI291610 AW169600 D31161 AA905362 C21179 BE327258 D31474 AW439053 D31309 BF756901 BI838626 BF979839 |
| | | AU149562 BM142116 AU156455 AA452028 AW473972 AW468490 AA410271 AI475944 BF821859 AA658188 AI360390 AA226320 F37355 |
| | | F27660 F36093 AA152126 BF930021 BF375775 AW821784 AW975085 W16475 D31031 BG696392 AW860676 AW752864 BI013705 |
| | | BF965715 BF326604 AW821786 |
| 437204 | 28243_1 | AL110216 AI816283 AI688476 AA928351 AW157672 AI288740 BE468242 AI452476 AI291665 AW192364 BE503635 AW592672 AA857393 |
| | | AW162770 AI680660 AI879565 AI347717 BF880800 AI266646 AA834381 AI291667 AI264567 Z38449 T03352 AI929432 BE673697 |
| | | AI124770 AI350389 AA910378 R54042 AV746670 AW089037 AV729218 H28971 R38549 AI692560 BE671562 BE669916 BE672206 |
| | | BF445152 BF445151 AI914323 AI684406 AA932348 BE670597 AA932080 |
| 440282 | 21425_1 | NM_021188 U90919 BM458077 BG214941 AL562127 BG197712 AW994207 AA043114 AW993474 AA631832 AI911529 BI001014 |
| | | BE156322 BG319454 H27376 BG220618 BG189474 BG325006 AL519085 BM472894 AL520560 BG575806 AA319317 BG621802 |
| | | BG912722 AV760869 AV760871 R13243 BE274097 BG327062 BI765172 BE614338 BG214923 BM153391 AU147675 N58119 AL043557 |
| | | AL043558 AL043510 AA773474 AU148079 BF062869 AW189972 AW250398 AI028605 AI434688 AW149344 AI246783 AI961376 AI698209 |
| | | AA251535 AU160747 AA579811 AI572570 AI656228 AA426093 AA127171 BF222487 AA725576 F21161 AI932217 BF222251 AI024660 |
| | | AA780998 AI538862 AW140038 AI122909 AA493515 AA401920 Z39789 F10942 F05081 AA814868 F10376 AA776314 AA993104 T94991 |
| | | AW583990 AA128211 F03074 AL579261 AL519084 AA384895 BG196670 AW083526 BF220181 BE669988 BF907279 T23499 AL520559 |
| | | AU149005 N38766 H96506 AA040865 AI263737 AA723350 AI168145 AA652386 AI374699 AA487377 AI927374 AI985531 AI352105 |
| | | AI040092 AA486562 BM053020 Z41738 BE243710 AA601558 BM052743 AI445827 AA487260 AI982679 AW130546 AI743384 AI335647 |
| | | AW978172 R40324 AV736436 BE966360 AI185467 AI367193 N75025 AW131068 BE940519 H43910 AA486659 BE614365 BF220261 |
| | | BE181357 BG189473 BG210176 H43958 |
| 450251 | 40382_4 | BE080483 AI689298 BE080416 |
| 441181 | 31840_3 | AK027315 NM_032472 BG195928 BG940337 AA742244 BG195277 AA424400 AA812029 BG220715 AA416925 AA724544 BG755237 BG489761 |
| | | BG340645 BE696471 |
| 400205 | 2538_1 | NM_006265 D38551 X98294 BM477931 BM461566 AU123557 AU133303 AU134649 AW500421 BM172439 AW500587 AW503665 |
| | | AW504355 AW503640 BM152454 AW505260 AI815984 AW504075 AW500716 AL597310 BC001229 BM474371 AA984202 AU135205 |
| | | BE090841 AW163750 BF747730 BF898637 AI206506 AV660870 AV692110 AW386830 AV656831 N84710 AW993470 BF086802 |
| | | BF758454 BG960772 BF757769 BI870853 BE018627 C75436 AW148744 BF757753 BG622067 BE909924 AA708208 BG530266 BF968015 |
| | | AW992930 BF888862 BG536628 AA143164 AW748953 BG498922 BF885190 BF889005 BF754781 BF800003 BM476529 AI627668 |
| | | AW028126 AL046011 BF590668 AI017447 AA579936 AI367597 AA699622 BE280597 AI124620 AI082548 AW274985 AA677870 AI056767 |
| | | BE551689 AA287642 H94499 AI752427 AI652365 AW002374 AW062651 AA360834 N68822 AU135442 AU125960 Z78334 BE545813 |
| | | AI092115 BF312771 BF242859 BG533616 BG533761 BG164745 BG492433 BM473183 AA172043 AA172069 AU157092 AU151353 |
| | | AU155318 BE302211 AI375022 AA085641 AU157923 H88858 AA132730 AA115113 AA909781 AI475256 AA424206 AW572383 AW084296 |
| | | AI184820 AI469178 AA782432 H92184 AA340562 BF195818 AA852821 AW576342 AA827107 AA173317 AW190014 AI918514 AA729372 |
| | | AA729718 AI055958 AA331424 BE328601 AA515690 BI018896 AW628277 AA748368 AA626222 BG492636 AW380620 BF800058 |
| | | AW370956 AA290909 R25857 BG952995 BF801437 AA172077 AU155890 AU149783 AI720904 AA902936 AA865727 AI470830 AV740677 |
| | | AA142982 AA482485 AU145485 AW576399 AU156042 R63448 BF246427 BE928472 D25910 BF758439 BF968785 BE565238 AA355981 |
| | | AI905607 BG291148 BG533096 BG532888 BF030886 BG613756 BE928471 BG574501 AA187596 AA361196 T95557 BG531446 |
| | | BG527242 BG527513 BG611106 AA085995 BF847252 BG024608 BE540261 BG531236 AL579993 BG108733 BG483503 BG571032 |
| | | BG492505 |
| 447881 | 44623_1 | AK074291 AW293424 BE676135 AI832125 BE019146 BE465019 AI761124 AA617778 AI279232 AW575897 AI672039 F28618 BF924261 AA722184 BF934174 |
| | | BE004328 AV749301 BE880282 BI019798 BI019389 BF928776 AW813409 AV726604 AA077560 BE272975 BF949119 AW814195 BE879126 AI697926 BF594155 BE205787 |
| | | BF063513 N35828 AI948557 AI433839 AI379679 BG056182 AI589094 N23123 AA588805 AW316581 AI080272 AI421980 AI493318 BF194830 N87590 AA495993 N32996 |
| | | AA699844 H96845 H96592 N28741 BI035539 BF747723 BF171066 W01350 H05495 AI243785 Z39622 AA887432 AI350659 R46102 |
| 400277 | 170_1 | Y00281 NM_002950 BC010839 BC007995 BG675232 BM468552 AL555484 BG831516 BF035300 BG677277 BF852972 BE314901 |
| | | BF850656 AI371816 AA292474 AA375747 AA308414 BM454544 BI333370 BM049921 BI461428 BI465007 BI223401 BE856245 AW821164 |
| | | BF914775 BF914761 AU125835 BI222678 BI091137 BF340536 BM462798 BI224452 BG707915 AL569160 AA443815 AW572867 |
| | | AW363410 BF739268 BG010283 BI013120 BF818845 BF763468 AA305165 AI630370 AA039826 R24906 H02046 T96891 BF981330 |
| | | AW936510 AA478169 H04587 BG166574 BI869342 BE562482 BE539637 AA165089 AL579118 AL553699 BE044054 AW117440 AI520674 |
| | | BF435417 AW245648 AI952404 T29534 AU153459 AU152168 AW591591 AU146918 AI393187 AA478013 AU148143 AI224471 AI640728 |
| | | AI871537 AW264752 N93787 AI189357 AV756134 AI471659 AU147466 AA779206 AU149419 AU149104 AU159135 AA312221 AW445119 |
| | | AW021912 AI799771 F04407 AI285530 AI914643 AW068751 AA513325 AA164627 AA639285 AA569644 T96892 AI923594 BF439180 |
| | | BI770936 BF032438 AU154884 AA682793 AW072992 AU158815 AI884444 AL048031 AU158922 AU152546 AI695187 AL048033 AI245650 |
| | | AU148507 AW467451 BE536868 BF913001 BF062707 AL573082 AW067993 AA523354 BE886727 AI890705 AU159092 AI982693 |
| | | AI817553 AA236729 AI687858 BG163767 AI524675 AI678155 AA127100 AI762661 AU159718 AI469720 AA483627 AW131696 R26868 |
| | | AI199885 AW875614 AW938694 AW578974 BI763988 BG819168 BE874767 BG978292 BE162948 AL555483 AW189719 T56783 AI018819 |
| | | AI476552 BI492837 AI824440 BG996262 AA932887 AI380726 R79530 AA622108 AI262575 T56782 R27437 BE784153 AW129549 |
| | | AI675567 AI866759 BG987935 |
| 453295 | 10026_2 | BE839522 BG435352 T92108 BF110411 BE218830 BF433169 AI123554 BE465150 BE670689 BF447917 BE218141 AW204147 AI680839 |
| | | BF440050 AW770504 AW770660 AW418617 BF196503 AA053779 AI128652 AW117727 AI375178 AW071507 AI399890 AW662064 |
| | | AI401276 AW341172 AI197958 AA749065 AW168735 AW615171 AA908390 AI300043 AA233865 AI174331 AI783832 AI202132 AA723885 |
| | | N34922 N34888 AW612097 BF062429 AA034410 N71077 AA232810 AA826658 AA773393 H27681 AW071706 AA702830 R01133 H58727 |
| | | H27682 AW750643 R43716 R40566 H10351 R52554 BG120686 AW842476 |
| 439574 | 689966_1 | BG532820 AW246001 AI469788 AI350090 AI446788 BE549330 W84862 AA837988 |
| 414405 | 112689_1 | AL047596 AA393792 AI670731 AI037957 AW874364 AI038137 N62286 AI241379 BE501096 AW090696 AI927369 AI669226 AI369437 |
| | | AI371075 AW612409 AI686711 AI183289 AA477717 AI076122 AA635190 AA700984 AA781508 D81020 BF575223 AI356183 D79312 |
| | | AI375558 H61111 BG283489 BE090666 BE090664 BE090662 H26545 |
| 414051 | 1630028_1 | BE246216 BE244127 |
| 407198 | | |
| 412537 | 14066_1 | AK025201 AA425472 AI694282 BG057305 AA907787 AI286170 AI684577 AJ420494 AI809865 BF058095 AI478773 AI160445 AL044114 AW665529 AI129239 |
| | | AW297152 AI268215 AI469807 AI969353 BE552356 N66509 AA736741 AA382555 AW075811 AV759188 BI259364 BF445142 BG232065 AI141758 AI631202 AI167566 |
| | | AI208445 AA889823 BF982682 N90322 BI090882 BF208005 AW953918 AL044113 AI016793 AA382556 AW235763 AA927051 AI862075 BE886691 BE619282 |
| 442961 | 60316_2 | BE966247 BE220885 BE467384 BE350135 BE672094 AI811582 AW665254 AA772731 AI283601 AA417067 AW197746 AI868357 AI792143 AA931120 AI758506 |
| | | AA843761 BE737582 AW379586 N38812 BG567321 H13257 |
| 438869 | 52134_1 | AF075009 R63109 R63068 |
| 419502 | 5010_2 | D17251 M26878 AL579998 AL564415 AL531236 AL580013 AL531803 AL564796 BG564725 BG566337 BG617057 AL564772 BG566858 |
| | | AW950670 AV681936 BG562894 AL564428 AW452959 AL564767 AL531808 AW805054 BG562392 AV656001 AA011414 AL579726 |
| | | T72793 AL531610 AL579889 T68044 BG616669 AL531632 AI017721 AW772543 AL564742 T73787 T64764 AL564460 T68170 AL564715 |
| | | AL532514 AL531830 T67832 T69440 AL564692 T53939 T64121 AL564508 T60385 AL564753 AA342489 AA343045 AA341907 T64595 |
| | | T64309 T58898 T71857 AA342807 T64305 T71916 T72079 AA341964 T41006 T56035 T67820 T71870 T71895 T61875 T71958 R06796 |
| | | T68091 T71289 T72525 T71959 T62764 T73729 T68607 T73341 T61350 T61376 T67922 T68707 T60476 T69293 T69283 T73425 T68107 |
| | | T73317 T53747 T68301 T62888 T67862 T69420 AL564633 AA343060 T71914 T39648 T73952 T61277 T58786 T73400 T67864 T73277 |
| | | T69445 T73137 T67755 T67736 T64425 BG567196 R93196 T82897 T51176 BG567088 T64232 T71715 T69081 T62136 |
| 438714 | 2576235_1 | AA814859 AI582623 AA814857 |
| 446019 | 658727_1 | AI362520 D25917 AI670784 AI742347 AW269789 AI270700 AW610541 AW793036 AW793035 AW610540 AW362220 AW362166 |
| | | AW362214 AW362225 AW362228 AL119827 |
| 415989 | 10194_1 | BC013389 BC017398 AI023543 AA191424 AI267700 AI469633 AW958465 AW953397 AA172056 BE940298 BF909208 BF909980 |
| | | BF095153 BG285837 AI720344 BF541715 AA355086 AA172236 |
| 432339 | 57992_1 | BG823745 AW411259 BG111139 BM041741 AW015049 AW068953 AW014085 AA969360 AI027260 AI948416 AW015886 AA918278 |
| | | AA705292 AA702483 AA534205 BE856934 AI129462 BE926765 AI684275 R52686 N34869 H23555 |
| 429588 | 1396089_1 | AI092511 AI080271 AA455177 AI381859 AI381721 |
| 452279 | 11990_1 | AF392454 AK023074 AI884890 AI814455 AW966220 BF736545 AA026021 AA286843 AA251918 BG197710 AA026294 AA337356 |
| | | BC010422 AK023226 NM_022776 BM459496 AA769310 AI826460 AU153650 AU160375 AW166211 AW292992 BF433538 AI823888 |
| | | AI684798 AI655985 AW770982 AI400454 AI276257 AA639510 AI689818 AW772604 AA807639 AU130298 AU132028 BF900889 BF904822 |
| | | AY007102 AU143256 BG621460 AA829630 AI864665 AI084922 AA025234 AI360060 AA766554 AA026295 AA825817 AA251762 |
| | | BE180751 BM464530 AV715833 AA779447 AI452519 AW418525 AA435643 D25894 AA435651 AA286844 N64369 AI702262 BG288063 |
| | | BE170545 BM466232 BE299160 AA169573 AL567428 BF217285 BE967276 |
| 412560 | 72553_1 | BF002870 AI003925 AI082639 AA194383 AA702993 AI767866 AL575096 BF593252 AI948584 AI678666 BI963722 AI765219 AA620965 |
| | | BE671938 AI004689 AI004690 AI990303 AI127228 BE856290 AW203978 AI934786 AI770075 AI144132 AA812597 AI813349 AI142908 |
| | | BE671242 AI208243 H82735 BF115200 AJ345984 BE044308 F32992 AJ346047 F24958 AJ346565 AJ346456 F18071 R24502 BI830577 |
| | | BI222716 H83611 AA507760 BE463806 AA194467 AI865963 BF434962 C04894 AA813511 AA112966 N89963 |
| 433586 | 32908_1 | BC011194 AW517087 AA601054 T85512 |
| 412811 | 17212_1 | AK055716 AL520498 AL522781 BE047862 AI424991 AI863108 AA598689 AW016452 AL520499 AW957730 AA352014 BE263253 Z41952 AA121201 AV753206 |
| | | AI693507 AI091148 AA599060 AI364268 AI241940 AW089149 AW090733 AW088875 Z38240 BG958294 AA813482 AA121202 BG992558 H06383 BF435657 BE857533 |
| | | R39887 AA620528 R41807 R17734 H06382 R13591 D60420 BG958640 |
| 420439 | 35849_1 | BG614459 BE089799 R26499 AW577415 BG392326 AI034474 AA281692 BI492660 AI813489 AI762456 AI669527 BM069794 AW055057 |
| | | AW438593 AA702328 AA262137 AI379307 AA281632 AA694381 AI422791 AW243902 AA493261 AI868989 D62032 BG529976 BE504426 |
| | | AA369546 AW869612 AW021723 AW965366 AW117912 AI742020 AW970160 AA514538 AW449526 AW082476 N99706 AA262413 |
| | | AA333518 BG822620 AA643040 AW236597 BE220653 AA768827 AI081788 AA877024 N71978 AA612940 AI290151 AW082653 AI383270 |
| | | C16425 AA722211 AI539327 AA369545 AA522467 N93082 AI371310 AW082649 AW270041 AI292303 BF856785 D19612 AI701667 |
| | | R50985 AW869643 |
| 452598 | 2741_1 | AK055715 AI129800 AW027959 AI927949 AI650270 AW514661 AI708393 AL138076 AI926721 AA749139 AI399955 AW874011 AI302816 |
| | | AI242763 AA828301 AA262795 AI093249 AI084565 AA904444 BE245661 AI810709 N30447 AI653617 AI289975 AI474418 AA737455 |
| | | AI619613 AA291708 AI640264 N91446 AW029069 AA680378 AA338773 BC022321 BM450359 BE439944 AA521348 AI066761 AL138075 |
| | | BM153113 BM153112 AW182953 BM147809 AI247395 AI911116 AA977587 AA291690 AI243777 F35824 AA579199 BM479711 AW961031 |
| | | H92980 H86861 AA026904 AI052445 R92739 T10789 AV49986 AL540531 AA452953 BM152599 AA382769 BI550695 BG432646 |
| | | AV744808 |
| 447832 | 1036795_1 | AI628543 AI433357 AW772732 |
| 449343 | 14470_1 | AK055378 BE896063 AV722833 BI032095 BF952019 BG547204 AI151418 W03542 W60401 AI346936 AA862855 W60310 N72501 |
| | | BF963436 C04881 H90060 AA001203 AI863984 AI932612 AI499771 AI187944 AA501896 AA714924 H00689 AA918680 AA573996 |
| | | AA521308 AW182868 BF996707 AA908959 AI628880 AW173363 AW665845 AA130178 AI818267 AI653663 AI828924 AA746655 AI951984 |
| | | AI635625 AI093113 AI377976 AI624029 AI418242 R76291 W92652 AI207798 AV706224 AA742467 AA641806 W61229 AA130170 |
| | | AA160170 H85007 W72474 W61163 H97873 AL047509 R76567 AA812071 H81599 AA021275 H85004 H85894 BG537537 BF830518 |
| | | W76228 W46673 Z43839 R78710 C01747 H00789 BI036345 W92828 BE150445 AW380821 AW173095 H85630 H81598 H86032 R84855 |
| | | R13223 AA774992 |
| 406687 | 0_0 | M31126 |
| 418259 | 133853_1 | BM310925 AA426110 BM310629 BF434286 AW015091 BF475996 AW118867 BE675186 AI688568 AI453594 AW590589 AI652425 |
| | | AI827969 BF056946 AI802866 AI393380 AI476224 AW590639 AW136271 AI458252 AI524726 AA843768 AA782158 AI336058 AI097532 |
| | | AW451563 AA459408 AA459633 AA418444 W23607 BG940150 AI493445 AW054729 AI221929 AI868744 AA215405 AA766713 AA621546 |
| | | BF928317 BE464132 AI990909 AW271459 AI262061 AA215404 N74332 BG940151 BG952261 AA972115 W96315 AA689586 R69057 BF766886 BE769254 W05240 |
| 434804 | 118455_1 | AA659316 H64973 AA649530 |
| 452921 | 92089_1 | AW977983 AA029637 AA029697 AA806003 BF808645 W74124 AA809498 T17497 BE549804 W79644 BF446767 AI694200 AA988927 BE047252 |
| 431912 | 610_10 | BI763666 BI517886 BI759051 AI688604 AI660552 BF588523 AW004785 AW295479 BF591117 BF002672 BF064073 AA594441 AI380340 AI700219 |
| | | AI659950 AI688540 AW296326 |
| 437866 | 34267_1 | U52054 AL581000 AA156850 AW293839 BI335865 AA024963 BF149420 BE073977 AW602574 BE164012 BE163992 BE163974 |
| | | AW402161 BM194134 AW966609 W84374 BF916380 AA385173 W84366 AA383743 BF903598 AA043776 W84421 AA778446 AW444904 |
| | | BF446960 AA837481 AV755539 AW468444 AW468002 AA811830 AA581806 AI866686 AI572124 AA687333 D20160 AA812489 AU185248 |
| | | AU186004 AA156781 AI536733 BM144850 AI471883 AA040926 BF507639 AA043777 AW874142 BE832523 BE163972 BI022546 BI021204 |
| 413413 | 26025_3 | BG261240 BG231707 AI440201 BF540868 BF240794 BE779394 BG505096 AA129208 D82298 T10758 AU155599 BF857123 BF836348 |
| 451320 | 12225_2 | AK057826 AI631982 AA224195 AI701458 AA890570 AW966562 AW071907 AI671352 AI375892 T03517 AI124088 R88265 AI084316 |
| | | BF223720 AI354686 T33652 AW205836 BE931115 AI720211 T03490 BF084055 AI372637 T15415 BG054890 AA630384 F26326 AI140719 |
| | | AA443303 T33230 T33623 T33511 T33785 AW118072 W20198 AI657180 T15734 AI419606 N90552 AA224388 T15909 T03515 D55612 |
| | | W27899 |
| 437158 | 59575_1 | AL050068 AA160485 AW173544 AW296506 AW439860 AI521563 AI702529 AI393606 AW138323 AA570109 H19504 BM021968 BF063327 BF593552 |
| | | AA630766 AI597717 AI807128 AA523012 AI356250 AW451857 AA974203 AI762577 BF512552 AW007307 BE675286 AW450602 AA962057 AW516069 AI582546 |
| | | BF221924 BF222543 AI801808 AW468599 AW000736 AI866625 AW235356 BM021837 AA911956 AI680606 W86516 T03370 AW611634 H41653 AI468349 H19588 |
| | | AW090198 AW043993 R39847 |
| 412122 | 3941_2 | AK056423 AW070901 BG222419 BF928848 AL567752 AW770702 BE160226 AW248894 AI304851 AI090802 BF514704 AI659696 |
| | | AI762084 BE018718 AI088023 BF876482 AA283824 BF742200 AI349494 AI942345 AL576641 BG959608 AA853964 AA854927 AA767839 |
| | | AI955028 BG611080 BI497416 AW947186 AI703492 AW612137 AI696372 BM016022 AW852632 N57282 BI859575 AA100379 AI879394 |
| | | AI653605 BM459051 AI446574 BG031916 BI004602 BM014817 AA725075 BE063022 BG741166 BF088949 AI937125 AW936878 |
| 433023 | 3970_8 | BE999967 BF438599 AW864793 AI802899 BE815132 AW468888 AI672189 AI052004 BF112024 AA772335 AW275054 AA573845 AI144148 AI968683 AA846676 |
| | | AA927355 H80424 AW973295 R88209 F29868 BE928871 |
| 441128 | 20932_1 | BC014072 BE328850 AI356567 AI148171 AI022165 BG149661 BF000671 AA233101 AA573721 AA447991 AW016855 AI005068 AA554071 |
| | | BF478215 AA906902 AW014761 BE905651 BE512923 BM047129 AA243852 AA232991 AA127550 AA127551 AA570256 AI473237 |
| | | BF033706 N90525 AW973623 AI359627 BG674574 BE903322 |

Pkey: Unique Eos probeset identifier number
CAT number: Gene cluster number
Accession: Genbank accession numbers

[0354] TABLE 6C

| | | | |
|---|---|---|---|
| Pkey | Ref | Strand | Nt_position |

| | | | |
|---|---|---|---|
| 406399 | 9256288 | Minus | 63448-63554 |
| 403149 | 9799833 | Plus | 25034-25185 |
| 401197 | 9719705 | Plus | 176341-176452 |
| 401451 | 6634068 | Minus | 119926-121272 |
| 405770 | 2735037 | Plus | 61057-62075 |
| 401519 | 6649315 | Plus | 157315-157950 |
| 404440 | 7528051 | Plus | 80430-81581 |
| 402736 | 9212044 | Minus | 66876-67010 |
| 401866 | 8018106 | Plus | 73126-73623 |
| 404568 | 9966995 | Minus | 92893-93116 |
| 401403 | 7710966 | Plus | 146180-146294 |
| 402812 | 6010110 | Plus | 25026-25091, 25844-25920 |
| 402802 | 3287156 | Minus | 53242-53432 |
| 404996 | 6007890 | Plus | 37999-38145, 38652-38998, |
| | | | 39727-39872, 4055 |
| 400583 | 9887611 | Minus | 201148-201272 |
| 402053 | 8083229 | Plus | 62703-63179 |
| 400880 | 9931121 | Plus | 29235-29336, 36363-36580 |
| 402408 | 9796239 | Minus | 110326-110491 |
| 401747 | 9789672 | Minus | 118596-118816, 119119-119244, |
| | | | 119609-11976 |
| 403485 | 9966528 | Plus | 2888-3001, 3198-3532, 3655-4117 |
| 403817 | 8962065 | Plus | 110297-111052 |
| 402496 | 9797769 | Minus | 8615-9103 |
| 401464 | 6682291 | Minus | 170688-170834 |
| 402855 | 9662953 | Minus | 59763-59909 |
| 406081 | 9123861 | Minus | 38115-38691 |
| 405387 | 6587915 | Minus | 3769-3833, 5708-5895 |
| 401558 | 7139678 | Plus | 103510-104090 |
| 400810 | 8567959 | Minus | 174204-174331, 175062-175205 |

Pkey: Unique number corresponding to an Eos probeset
Ref: Sequence source. The 7 digit numbers in this column are Genbank Identifier (GI) numbers. “Dunham I. et al.” refers to the publication entitled “The DNA sequence of human chromosome 22.” Dunham I. et al., Nature (1999) 402: 489-495.
Strand: Indicates DNA strand from which exons were predicted.
Nt_position: Indicates nucleotide positions of predicted exons.

[0355] TABLE 7A
About 381 genes upregulated in lung metastases to the brain relative to normal body tissues

| Pkey | ExAccn | UniGeneID | UniGene Title | R1 | SEQ ID NO(s): |
|---|---|---|---|---|---|
| 427383 | NM_005411 | Hs.177582 | surfactant, pulmonary-associated protein | 4.88 | 2150 5337 |
| 431433 | X65018 | Hs.253495 | surfactant, pulmonary-associated protein | 3.75 | 2553 5474 |
| 442275 | AW449467 | Hs.54795 | Homo sapiens secretoglobin, family 3A, m | 5.20 | 3409 |
| 444342 | NM_014398 | Hs.10887 | similar to lysosome-associated membrane | 2.78 | 3591 5638 |
| 450726 | AW204600 | | HUMPSPBA Human pulmonary surfactant-asso | 3.52 | 4155 |
| 426251 | M24283 | Hs.168383 | intercellular adhesion molecule 1 (CD54) | 3.24 | 2043 5296 |
| 406698 | X03068 | Hs.73931 | major histocompatibility complex, class | 2.62 | 4751 89 |
| 431164 | AA493650 | Hs.94367 | thyroid transcription factor 1 | 5.90 | 2534 |
| 428438 | NM_001955 | Hs.2271 | endothelin 1 | 2.75 | 2257 5358 |
| 412869 | AA290712 | Hs.82407 | CXC chemokine ligand 16 | 2.50 | 680 |
| 414517 | M24461 | Hs.76305 | surfactant, pulmonary-associated protein | 27.02 | 4920 839 |
| 457200 | U33749 | Hs.197764 | thyroid transcription factor 1 | 9.15 | 4582 5812 |
| 421798 | N74880 | | N-acylsphingosine amidohydrolase (acid c | 6.86 | 1564 |
| 412870 | N22788 | Hs.82407 | CXC chemokine ligand 16 | 2.67 | 681 |
| 448133 | AA723157 | Hs.73769 | folate receptor 1 (adult) | 2.62 | 3947 |
| 421502 | AF111856 | Hs.105039 | solute carrier family 34 (sodium phospha | 7.84 | 1527 5110 |
| 427834 | AA506101 | Hs.285813 | hypothetical protein FLJ11807 | 2.57 | 2199 |
| 400328 | X87344 | | transporter 2, ATP-binding cassette, sub | 2.82 | 12 4685 |
| 427700 | AA262294 | Hs.180383 | dual specificity phosphatase 6 | 2.50 | 2185 |
| 425371 | D49441 | Hs.155981 | mesothelin | 6.28 | 1957 5259 |
| 424273 | W40460 | Hs.144442 | phospholipase A2, group X | 2.63 | 1823 |
| 414945 | BE076358 | Hs.77667 | lymphocyte antigen 6 complex, locus E | 3.49 | 894 |
| 432006 | AL137382 | Hs.272320 | Homo sapiens mRNA; cDNA DKFZp434L1226 (f | 5.44 | 2626 |
| 418067 | AI127958 | Hs.83393 | cystatin E/M | 2.99 | 1156 |
| 428970 | BE276891 | Hs.194691 | retinoic acid induced 3 (RAIG1); metabo | 3.24 | 2321 |
| 435472 | AW972330 | Hs.283022 | triggering receptor expressed on myeloid | 6.14 | 2917 |
| 425211 | M18667 | Hs.1867 | progastricsin (pepsinogen C) | 19.38 | 1936 5251 |
| 414915 | NM_002462 | Hs.76391 | myxovirus (influenza) resistance 1, homo | 2.82 | 4934 892 |
| 431630 | NM_002204 | Hs.265829 | integrin, alpha 3 (antigen CD49C, alpha | 3.27 | 2578 5483 |
| 416700 | AW498958 | Hs.343475 | cathepsin D (lysosomal aspartyl protease | 2.63 | 1014 |
| 430300 | U60805 | Hs.238648 | oncostatin M receptor | 3.07 | 2465 5441 |
| 413278 | BE563085 | Hs.833 | interferon-stimulated protein, 15 kDa | 4.60 | 705 |
| 413936 | AF113676 | Hs.297681 | serine (or cysteine) proteinase inhibito | 2.67 | 4910 765 |
| 413527 | BE250788 | Hs.179882 | hypothetical protein FLJ12443 | 2.85 | 731 |
| 435575 | AF213457 | Hs.44234 | triggering receptor expressed on myeloid | 3.06 | 2929 5566 |
| 419092 | J05581 | Hs.89603 | mucin 1, transmembrane | 3.25 | 1275 5038 |
| 454453 | AW752781 | | hypothetical protein FLJ12614 similar to | 2.86 | 4485 |
| 427621 | BE621182 | Hs.179882 | hypothetical protein FLJ12443 | 3.63 | 2173 |
| 409917 | H07989 | Hs.4302 | ESTs, Weakly similar to T29299 hypotheti | 2.50 | 418 |
| 436939 | AA853680 | Hs.5345 | arginyl aminopeptidase (aminopeptidase B | 2.71 | 3022 |
| 400245 | | | Eos Control | 2.68 | |
| 432941 | W04803 | Hs.279851 | hypothetical protein FLJ10241 | 2.50 | 2713 |
| 410731 | AK001531 | Hs.66048 | hypothetical protein FLJ10669 | 2.68 | 4855 512 |
| 429380 | AF023268 | Hs.200600 | secretory carrier membrane protein 3 | 2.64 | 2363 5403 |
| 444198 | AI345232 | Hs.153503 | hypothetical protein FLJ22529 | 2.64 | 3583 |
| 429547 | AW009166 | Hs.99376 | FGENESH predicted novel secreted protein | 2.91 | 2387 |
| 450296 | AL041949 | Hs.24756 | hepatocyte growth factor-regulated tyros | 2.59 | 4126 |
| 426410 | BE298446 | Hs.305890 | BCL2-like 1 | 2.51 | 2063 |
| 433029 | NM_014322 | Hs.279926 | opsin 3 (encephalopsin) | 2.62 | 2726 5524 |
| 413719 | BE439580 | Hs.75498 | small inducible cytokine subfamily A (Cy | 2.98 | 749 |
| 440340 | AW895503 | Hs.125276 | ESTs | 2.75 | 3284 |
| 418057 | NM_012151 | Hs.83363 | coagulation factor VIII-associated (intr | 2.73 | 1153 5002 |
| 421110 | AJ250717 | Hs.1355 | cathepsin E | 3.11 | 1481 5094 |
| 425676 | AW410656 | Hs.159161 | Rho GDP dissociation inhibitor (GDI) alp | 2.57 | 1986 |
| 444006 | BE395085 | Hs.10086 | type I transmembrane protein Fn14 | 2.92 | 3568 |
| 409420 | Z15008 | Hs.54451 | laminin, gamma 2 (nicein (100 kD), kalini | 3.28 | 368 4824 |
| 440672 | AF083811 | Hs.7345 | MAD1 (mitotic arrest deficient, yeast, h | 2.89 | 3311 5612 |
| 407242 | M18728 | | gb:Human nonspecific crossreacting antig | 2.85 | 142 4766 |
| 448641 | R31845 | Hs.21666 | insulin-like 4 (placenta) | 2.80 | 3991 |
| 430044 | AA464510 | Hs.152812 | ESTs | 2.55 | 2439 |
| 408748 | J05500 | Hs.47431 | spectrin, beta, erythrocytic (includes s | 2.59 | 302 4806 |
| 447699 | AB011116 | Hs.284251 | KIAA0544 protein | 2.62 | 3892 5696 |
| 429978 | AA249027 | | ribosomal protein S6 | 2.96 | 2433 |
| 416971 | R34657 | Hs.80658 | uncoupling protein 2 (mitochondrial, pro | 2.78 | 1044 |
| 436238 | AK002163 | Hs.301724 | hypothetical protein FLJ1301 | 2.79 | 2969 5577 |
| 413585 | AI133452 | Hs.75431 | fibrinogen, gamma polypeptide | 3.01 | 737 |
| 416448 | L13210 | Hs.79339 | lectin, galactoside-binding, soluble, 3 | 2.86 | 4961 998 |
| 419152 | L12711 | Hs.89643 | transketolase (Wernicke-Korsakoff syndro | 2.68 | 1283 5040 |
| 408663 | AA766699 | Hs.298351 | alveolar soft part sarcoma chromosome re | 2.68 | 288 |
| 439453 | BE264974 | Hs.6566 | thyroid hormone receptor interactor 13 | 3.98 | 3208 |
| 432320 | AW411066 | Hs.274351 | CGI-89 protein | 2.66 | 2654 |
| 424179 | F30712 | Hs.334573 | Homo sapiens, clone IMAGE:4285740, mRNA | 2.67 | 1812 |
| 451698 | Y16187 | Hs.26880 | endothelin converting enzyme-like 1 | 3.24 | 4241 5748 |
| 400213 | | | NM_014847*:Homo sapiens KIAA0144 gene pr | 2.59 | 2 4681 |
| 450065 | AL050107 | Hs.24341 | transcriptional co-activator with PDZ-bi | 2.60 | 4102 5725 |
| 410407 | X66839 | Hs.63287 | carbonic anhydrase IX | 2.88 | 474 4846 |
| 452827 | AI571835 | Hs.55468 | ESTs | 2.57 | 4350 |
| 437915 | AI637993 | Hs.202312 | Homo sapiens clone N11 NTera2D1 teratoca | 3.18 | 3105 |
| 447349 | AI375546 | | gb:tc23d04.x1 Soares_total_fetus_Nb2HF8_{—} | 2.71 | 3848 |
| 447131 | NM_004585 | Hs.17466 | retinoic acid receptor responder (tazaro | 3.21 | 3826 5683 |
| 447250 | AI878909 | Hs.17883 | protein phosphatase 1G (formerly 2C), ma | 2.59 | 3835 |
| 439841 | AF038961 | Hs.6710 | mannose-P-dolichol utilization defect 1 | 2.72 | 3238 5599 |
| 400203 | | | Eos Control | 2.87 | |
| 429544 | BE299343 | Hs.2430 | transcription factor-like 1 | 2.93 | 2385 |
| 407244 | M10014 | | fibrinogen, gamma polypeptide | 4.25 | 143 4767 |
| 445982 | BE410233 | Hs.13501 | pescadillo (zebrafish) homolog 1, contai | 2.71 | 3715 |
| 422083 | NM_001141 | Hs.111256 | arachidonate 15-lipoxygenase, second typ | 3.55 | 1598 5134 |
| 451063 | AW163702 | Hs.25911 | HLA-B associated transcript-2 | 2.87 | 4187 |
| 421975 | AW961017 | Hs.6459 | hypothetical protein FLJ11856 | 2.74 | 1587 |
| 407756 | AA116021 | Hs.38260 | ubiquitin specific protease 18 | 3.09 | 191 |
| 410102 | AW248508 | Hs.279727 | ESTs; homologue of PEM-3 [Ciona savignyi | 3.90 | 446 |
| 431250 | BE264649 | Hs.251377 | taxol resistance associated gene 3 | 2.57 | 2544 |
| 437387 | AI198874 | Hs.28847 | AD026 protein | 2.76 | 3062 |
| 456950 | AF111170 | Hs.306165 | Homo sapiens 14q32 Jagged2 gene, complet | 2.54 | 4571 5806 |
| 412817 | AL037159 | Hs.74619 | proteasome (prosome, macropain) 26S subu | 2.58 | 674 |
| 456031 | AA335996 | | eukaryotic translation initiation factor | 2.76 | 4526 |
| 406685 | M18728 | | gb:Human nonspecific crossreacting antig | 3.21 | 4745 83 |
| 437270 | R18087 | Hs.323769 | cisplatin resistance related protein CRR | 3.28 | 3051 |
| 416976 | BE243985 | Hs.80680 | major vault protein | 2.79 | 1046 |
| 449976 | H06350 | Hs.135056 | Human DNA sequence from clone RP5-850E9 | 3.21 | 4095 |
| 419705 | AW368634 | Hs.154331 | ESTs | 2.92 | 1351 |
| 420234 | AW404908 | Hs.96038 | Ric (Drosophila)-like, expressed in many | 3.06 | 1399 |
| 429619 | AL120751 | Hs.211568 | eukaryotic translation initiation factor | 2.60 | 2398 |
| 410575 | BE207480 | Hs.6994 | Homo sapiens cDNA: FLJ22044 fis, clone H | 2.84 | 494 |
| 458176 | AI961519 | Hs.140309 | Homo sapiens, clone IMAGE:3677194, mRNA, | 2.79 | 4613 |
| 411773 | NM_006799 | Hs.72026 | protease, serine, 21 (testisin) | 3.28 | 4867 576 |
| 437852 | BE001836 | Hs.256897 | putative GPCR | 2.60 | 3099 |
| 425236 | AW067800 | Hs.155223 | stanniocalcin 2 | 2.78 | 1941 |
| 416018 | AW138239 | Hs.78977 | proprotein convertase subtilisin/kexin t | 2.84 | 966 |
| 452732 | BE300078 | Hs.80449 | Homo sapiens, clone IMAGE:3535294, mRNA, | 2.73 | 4339 |
| 427584 | BE410293 | Hs.179718 | v-myb avian myeloblastosis viral oncogen | 2.65 | 2168 |
| 417881 | AI879117 | Hs.7991 | gb:au54g09.y1 Schneider fetal brain 0000 | 2.60 | 1135 |
| 453012 | T95804 | Hs.31334 | putative mitochondrial outer membrane pr | 2.57 | 4366 |
| 443179 | AI928402 | Hs.6933 | hypothetical protein FLJ12684 | 2.83 | 3503 |
| 432226 | AW182766 | Hs.273558 | phosphate cytidylyltransferase 1, cholin | 2.86 | 2645 |
| 458748 | AI381530 | | gb:te76d07.x1 Soares_NFL_T_GBC_S1 Homo s | 2.95 | 4635 |
| 418678 | NM_001327 | Hs.167379 | cancer/testis antigen (NY-ESO-1) | 2.67 | 1226 5024 |
| 427719 | AI393122 | Hs.134726 | ESTs | 2.54 | 2189 |
| 418399 | AF131781 | Hs.84753 | hypothetical protein FLJ12442 | 2.94 | 1196 5014 |
| 446872 | X97058 | Hs.16362 | pyrimidinergic receptor P2Y, G-protein c | 4.04 | 3796 5678 |
| 459255 | AI493244 | Hs.239500 | hypothetical protein MGC13114 | 2.79 | 4663 |
| 415989 | AI267700 | | ESTs | 2.85 | 963 |
| 435151 | AA348482 | Hs.4788 | nicastrin | 2.74 | 2901 |
| 421846 | AA017707 | Hs.1432 | protein kinase C substrate 80K-H | 2.58 | 1570 |
| 422997 | BE018212 | Hs.122908 | DNA replication factor | 2.81 | 1708 |
| 422675 | BE018517 | Hs.119140 | eukaryotic translation initiation factor | 2.53 | 1671 |
| 447733 | AF157482 | Hs.19400 | MAD2 (mitotic arrest deficient, yeast, h | 3.06 | 3897 5698 |
| 401131 | | | NM_00165*:Homo sapiens aquaporin 5 (AQP | 2.53 | 25 4696 |
| 430454 | AW469011 | Hs.105635 | ESTs | 2.93 | 2487 |
| 426318 | AA375125 | Hs.147112 | Homo sapiens cDNA: FLJ22322 fis, clone H | 2.71 | 2051 |
| 421541 | NM_003942 | Hs.105584 | ribosomal protein S6 kinase, 90 kD, polyp | 2.60 | 1536 5116 |
| 421506 | BE302796 | Hs.105097 | thymidine kinase 1, soluble | 2.64 | 1528 |
| 422532 | AL008726 | Hs.118126 | protective protein for beta-galactosidas | 2.66 | 1653 5153 |
| 451481 | AA300228 | Hs.295866 | hypothetical protein DKFZp434N1923 | 3.17 | 4225 |
| 412708 | R26830 | Hs.106137 | ESTs, Weakly similar to CGHU7L collagen | 3.23 | 661 |
| 441128 | AA570256 | | ESTs, Weakly similar to T23273 hypotheti | 3.08 | 3334 |
| 416902 | AA375634 | Hs.288974 | hypothetical protein FLJ12528 | 2.56 | 1035 |
| 402496 | | | Target Exon | 2.60 | |
| 452817 | AA322859 | Hs.284275 | Homo sapiens PAK2 mRNA, complete cds | 2.54 | 4347 |
| 437741 | BE561610 | Hs.5809 | putative transmembrane protein; homolog | 2.81 | 3085 |
| 413753 | U17760 | Hs.75517 | laminin, beta 3 (nicein (125 kD), kalinin | 3.08 | 4906 750 |
| 456977 | AK000252 | Hs.169758 | hypothetical protein FLJ20245 | 3.22 | 4572 5807 |
| 419214 | AI685324 | Hs.89709 | glutamate-cysteine ligase, modifier subu | 2.73 | 1289 |
| 446538 | AV658957 | Hs.135211 | ESTs | 2.52 | 3759 |
| 454034 | NM_000691 | Hs.575 | aldehyde dehydrogenase 3 family, member | 3.76 | 4462 5792 |
| 419663 | AA394208 | Hs.92198 | calcium-regulated heat-stable protein (2 | 3.03 | 1345 |
| 413582 | AW295647 | Hs.71331 | hypothetical protein MGC5350 | 3.14 | 736 |
| 424676 | Y08565 | Hs.151678 | UDP-N-acetyl-alpha-D-galactosamine:polyp | 2.63 | 1870 5224 |
| 427963 | AI042582 | Hs.181271 | CGI-120 protein | 2.52 | 2207 |
| 428643 | AA431383 | Hs.98701 | ESTs, Weakly similar to OSHU7B cytochrom | 4.14 | 2278 |
| 418329 | AW247430 | Hs.84152 | cystathionine-beta-synthase | 2.52 | 1186 |
| 434262 | AF121858 | Hs.12169 | sorting nexin 8 | 2.50 | 2824 5544 |
| 446766 | AF083208 | Hs.16178 | apoptosis antagonizing transcription fac | 2.96 | 3781 5676 |
| 437879 | BE262082 | Hs.5894 | hypothetical protein FLJ10305 | 3.10 | 3102 |
| 444371 | BE540274 | Hs.239 | forkhead box M1 | 3.68 | 3592 |
| 401451 | | | NM_004496*:Homo sapiens hepatocyte nucle | 2.64 | 27 4697 |
| 433485 | AI493076 | Hs.306098 | aldo-keto reductase family 1, member C2 | 3.79 | 2766 |
| 435750 | AB029012 | Hs.4990 | KIAA1089 protein | 2.89 | 2939 5570 |
| 408901 | AK001330 | Hs.48855 | hypothetical protein FLJ10468 | 2.54 | 316 4808 |
| 418526 | BE019020 | Hs.85838 | solute carrier family 16 (monocarboxylic | 3.06 | 1211 |
| 448633 | AA311426 | Hs.21635 | tubulin, gamma 1 | 2.81 | 3990 |
| 443715 | AI583187 | Hs.9700 | cyclin E1 | 3.24 | 3544 |
| 432441 | AW292425 | Hs.163484 | intron of hepatocyte nuclear factor-3 al | 3.45 | 2668 |
| 409041 | AB033025 | Hs.50081 | Hypothetical protein, XP_051860 (KIAA119 | 2.96 | 327 4811 |
| 420956 | AA351584 | Hs.100543 | Homo sapiens clone 24505 mRNA sequence | 2.73 | 1468 |
| 428844 | AW972635 | Hs.301904 | hypothetical protein FLJ12671 | 2.90 | 2311 |
| 404440 | | | NM_021048:Homo sapiens melanoma antigen, | 2.66 | 4721 54 |
| 420186 | NM_015925 | Hs.95697 | liver-specific bHLH-Zip transcription fa | 2.98 | 1392 5066 |
| 441031 | AI110684 | Hs.7645 | fibrinogen, B beta polypeptide | 3.05 | 3329 |
| 421307 | BE539976 | Hs.103305 | Homo sapiens mRNA; cDNA DKFZp434B0425 (f | 4.83 | 1506 |
| 422605 | H16646 | Hs.118666 | hypothetical protein PP591 | 2.78 | 1661 |
| 409893 | AW247090 | Hs.57101 | minichromosome maintenance deficient (S. | 2.64 | 415 |
| 440006 | AK000517 | Hs.6844 | NALP2 protein; PYRIN-Containing APAF1-li | 3.69 | 3252 5601 |
| 453902 | BE502341 | Hs.3402 | ESTs | 2.60 | 4449 |
| 424867 | AI024860 | Hs.153591 | Not56 (D. melanogaster)-like protein | 3.62 | 1891 |
| 450184 | W31096 | Hs.237617 | Homo sapiens, clone IMAGE:3447394, mRNA, | 2.50 | 4109 |
| 422756 | AA441787 | Hs.119689 | glycoprotein hormones, alpha polypeptide | 3.42 | 1679 |
| 408196 | AL034548 | Hs.43627 | SRY (sex determining region Y)-box 22 | 2.65 | 243 4790 |
| 428028 | U52112 | Hs.182018 | interleukin-1 receptor-associated kinase | 2.73 | 2215 |
| 404996 | | | Target Exon | 2.54 | |
| 414675 | R79015 | Hs.296281 | interleukin enhancer binding factor 1 | 2.78 | 861 |
| 429170 | NM_001394 | Hs.2359 | dual specificity phosphatase 4 | 3.10 | 2336 5392 |
| 440590 | AI863446 | Hs.266308 | mosaic serine protease | 2.50 | 3301 |
| 430316 | NM_000875 | Hs.239176 | insulin-like growth factor 1 receptor | 2.59 | 2470 5445 |
| 430056 | X97548 | Hs.228059 | KRAB-associated protein 1 | 2.59 | 2440 5434 |
| 448262 | AW880830 | Hs.186273 | Homo sapiens quiescin Q6 (QSCN6) | 3.89 | 3953 |
| 414907 | X90725 | Hs.77597 | polo (Drosophia)-like kinase | 2.66 | 4933 891 |
| 408116 | AA251393 | Hs.289052 | Homo sapiens, Similar to RIKEN cDNA 5430 | 2.56 | 237 |
| 426283 | NM_003937 | Hs.169139 | kynureninase (L-kynurenine hydrolase) | 4.59 | 2048 5297 |
| 454066 | X00356 | Hs.37058 | calcitonin/calcitonin-related polypeptid | 3.09 | 4467 5794 |
| 430508 | AI015435 | Hs.104637 | ESTs | 3.32 | 2490 |
| 450663 | H43540 | Hs.25292 | ribonuclease HI, large subunit | 2.97 | 4145 |
| 442577 | AA292998 | Hs.163900 | ESTs | 2.73 | 3447 |
| 453350 | AI917771 | Hs.61790 | hypothetical protein FLJ23338 | 2.65 | 4398 |
| 410444 | W73484 | Hs.132554 | gb:zd54e04.s1 Soares_fetal_heart_NbHH19W | 2.63 | 480 |
| 454057 | AW009478 | Hs.36574 | hypothetical protein FLJ21125 | 3.07 | 4465 |
| 430677 | Z26317 | | desmoglein 2 | 2.62 | 2504 5461 |
| 440457 | BE387593 | Hs.21321 | Homo sapiens clone FLB9213 PRO2474 mRNA, | 2.59 | 3289 |
| 425811 | AL039104 | Hs.159557 | karyopherin alpha 2 (RAG cohort 1, impor | 2.69 | 1999 |
| 410151 | X15723 | Hs.59242 | paired basic amino acid cleaving enzyme | 2.70 | 449 4838 |
| 420281 | AI623693 | Hs.323494 | Predicted cafion efflux pump | 2.56 | 1405 |
| 422880 | AF228704 | Hs.193974 | glutathione reductase | 2.80 | 1689 5161 |
| 424494 | U78575 | Hs.149255 | phosphatidylinositol-4-phosphate 5-kinas | 2.62 | 1852 5214 |
| 457819 | AA057484 | Hs.35406 | FLJ20522 Hypothetical protein FLJ20522 | 2.77 | 4601 |
| 440087 | W28969 | Hs.7718 | hypothetical protein FLJ22678 | 2.64 | 3260 |
| 424800 | AL035588 | Hs.153203 | MyoD family inhibitor | 3.02 | 1888 5232 |
| 412939 | AW411491 | Hs.75069 | eukaryotic translation elongation factor | 3.23 | 684 |
| 442660 | AW138174 | Hs.130651 | ESTs | 2.52 | 3458 |
| 440994 | AI160011 | Hs.272068 | ESTs | 3.34 | 3323 |
| 432026 | AA524545 | Hs.224830 | ESTs | 2.70 | 2627 |
| 429671 | BE379335 | Hs.211594 | proteasome (prosome, macropain) 26S subu | 2.75 | 2405 |
| 428758 | AA433988 | Hs.98502 | CA125 antigen; mucin 16 | 4.09 | 2292 |
| 429263 | AA019004 | Hs.198396 | ATP-binding cassette, sub-family A (ABC1 | 4.29 | 2345 |
| 426991 | AK001536 | Hs.214410 | Homo sapiens cDNA FLJ10674 fis, clone NT | 2.70 | 2117 |
| 450998 | BE387614 | Hs.25797 | splicing factor 3b, subunit 4, 49 kD | 3.02 | 4181 |
| 449207 | AL044222 | Hs.23255 | nucleoporin 155 kD | 4.28 | 4045 |
| 419897 | X90826 | Hs.93649 | upstream transcription factor 2, c-fos i | 2.59 | 1366 5059 |
| 457211 | AW972565 | Hs.32399 | ESTs, Weakly similar to S51797 vasodilat | 3.52 | 4583 |
| 419667 | AU077005 | Hs.92208 | a disintegrin and metalloproteinase doma | 3.43 | 1346 |
| 431083 | AF110400 | Hs.249200 | fibroblast growth factor 19 | 2.93 | 2530 5469 |
| 427239 | BE270447 | | ubiquitin carrier protein | 3.56 | 2134 |
| 418164 | AI761820 | Hs.41074 | ESTs, Weakly similar to 139294 McLeod sy | 4.48 | 1165 |
| 427528 | AU077143 | Hs.179565 | minichromosome maintenance deficient (S. | 2.84 | 2161 |
| 430375 | AW371048 | Hs.93758 | H4 histone family, member H | 3.26 | 2477 |
| 457465 | AW301344 | Hs.122908 | DNA replication factor | 3.03 | 4592 |
| 416000 | R82342 | Hs.79856 | ESTs, Weakly similar to S65657 alpha-1C- | 3.21 | 965 |
| 420005 | AW271106 | Hs.133294 | ESTs | 3.53 | 1372 |
| 425003 | AF119046 | Hs.154149 | apurinic/apyrimidinic endonuclease(APEX | 3.13 | 1909 5242 |
| 447033 | AI357412 | Hs.157601 | Predicted gene: Eos cloned; secreted w/V | 3.73 | 3814 |
| 453439 | AI572438 | Hs.32976 | guanine nucleotide binding protein 4 | 3.12 | 4406 |
| 428865 | BE544095 | Hs.164960 | BarH-like homeobox 1 | 3.74 | 2314 |
| 417542 | J04129 | Hs.82269 | progestagen-associated endometrial prote | 3.56 | 1101 4990 |
| 414416 | AW409985 | Hs.76084 | hypothetical protein MGC2721 | 2.72 | 824 |
| 435025 | T08990 | Hs.4742 | anchor attachment protein 1 (Gaa1p, yeas | 2.55 | 2889 |
| 419224 | NM_012189 | Hs.314452 | fibrousheathin II | 3.56 | 1290 5041 |
| 411975 | AI916058 | Hs.144583 | 3′UTR of: dead ringer (Drosophila)-like | 2.81 | 596 |
| 412856 | BE386745 | Hs.74631 | basigin (OK blood group) | 2.70 | 678 |
| 436887 | AW953157 | Hs.193235 | hypothetical protein DKFZp547D155 | 2.65 | 3018 |
| 447289 | AW247017 | Hs.36978 | melanoma antigen, family A, 3 | 3.12 | 3839 |
| 410512 | AA085603 | Hs.250570 | hypothetical protein MGC3180 | 2.69 | 487 |
| 453120 | AA292891 | Hs.31773 | pregnancy-induced growth inhibitor | 3.76 | 4375 |
| 440548 | AL117408 | Hs.7274 | DKFZP434P1750 protein | 3.15 | 3299 5609 |
| 444670 | H58373 | Hs.332938 | hypothetical protein MGC5370 | 2.68 | 3618 |
| 416478 | U38945 | Hs.1174 | cyclin-dependent kinase inhibitor 2A (me | 4.85 | 1204 5017 |
| 421526 | AL080121 | Hs.105460 | DKFZP564O0823 protein | 2.72 | 1534 5114 |
| 414774 | X02419 | Hs.77274 | plasminogen activator, urokinase | 3.51 | 4928 877 |
| 447400 | AK000322 | Hs.18457 | hypothetical protein FLJ20315 | 2.69 | 3857 5686 |
| 423063 | BE159877 | Hs.120824 | hypothetical protein FLJ21845 | 2.61 | 1714 |
| 432201 | AI538613 | Hs.298241 | Transmembrane protease, serine 3 | 3.48 | 2643 |
| 422976 | AU076657 | Hs.1600 | chaperonin containing TCP1, subunit 5 (e | 2.78 | 1705 |
| 435408 | H07897 | Hs.4302 | ESTs, Weakly similar to T29299 hypotheti | 3.29 | 2912 |
| 418506 | AA084248 | Hs.85339 | Unknown protein for MGC:29643 (formerly | 2.61 | 1208 |
| 422956 | BE545072 | Hs.122579 | ECT2 protein (Epithelial cell transformi | 3.61 | 1698 |
| 429228 | AI553633 | | hypothetical protein MGC33630 | 4.46 | 2340 |
| 415214 | AI445236 | Hs.125124 | EphB2 | 2.91 | 917 |
| 449281 | AI808699 | Hs.162717 | hypothetical protein MGC15668 | 2.79 | 4053 |
| 421305 | BE397354 | Hs.324830 | diptheria toxin resistance protein requi | 2.52 | 1505 |
| 437897 | AA770561 | Hs.146170 | hypothetical protein FLJ22969 | 3.10 | 3104 |
| 425159 | NM_004341 | Hs.154868 | carbamoyl-phosphate synthetase 2, aspart | 3.15 | 1931 5249 |
| 445654 | X91247 | Hs.13046 | thioredoxin reductase 1 | 3.98 | 3691 5658 |
| 408298 | AI745325 | Hs.271923 | Homo sapiens cDNA: FLJ22785 fis, clone K | 2.90 | 253 |
| 441362 | BE614410 | Hs.23044 | RAD51 (S. cerevisiae) homolog (E coli Re | 3.22 | 3347 |
| 420029 | BE258876 | Hs.94446 | polyamine-modulated factor 1 | 2.68 | 1375 |
| 408908 | BE296227 | Hs.250822 | serine/threonine kinase 15 | 2.65 | 317 |
| 442108 | AW452649 | Hs.166314 | ESTs | 3.36 | 3398 |
| 424905 | NM_002497 | Hs.153704 | NIMA (never in mitosis gene a)-related k | 2.69 | 1898 5237 |
| 438552 | AJ245820 | Hs.6314 | type I transmembrane receptor (seizure-r | 2.83 | 3148 5596 |
| 450074 | AI367213 | Hs.14070 | hypothetical protein FLJ14166 | 4.18 | 4103 |
| 416322 | BE019494 | Hs.79217 | pyrroline-5-carboxylate reductase 1 | 2.58 | 986 |
| 405770 | | | NM_002362:Homo sapiens melanoma antigen, | 2.71 | 4740 74 |
| 424001 | W67883 | Hs.137476 | paternally expressed 10 | 2.58 | 1788 |
| 439963 | AW247529 | Hs.6793 | platelet-activating factor acetylhydrola | 3.01 | 3250 |
| 424441 | X14850 | Hs.147097 | H2A histone family, member X | 2.63 | 1846 5212 |
| 410076 | T05387 | Hs.7991 | ESTs | 4.85 | 440 |
| 413142 | M81740 | Hs.75212 | ornithine decarboxylase 1 | 2.58 | 4894 695 |
| 448610 | NM_006157 | Hs.21602 | nel (chicken)-like 1 | 3.52 | 3989 5712 |
| 447960 | AW954377 | Hs.26412 | ring finger protein 26 | 3.56 | 3927 |
| 432415 | T16971 | Hs.289014 | ESTs, Weakly similar to A43932 mucin 2 p | 2.62 | 2665 |
| 453905 | NM_002314 | Hs.36566 | LIM domain kinase 1 | 3.30 | 4450 5788 |
| 437623 | D63880 | Hs.5719 | chromosome condensation-related SMC-asso | 2.58 | 3076 5587 |
| 453884 | AA355925 | Hs.36232 | KIAA0186 gene product | 2.87 | 4444 |
| 427715 | BE245274 | Hs.180428 | KIAA1181 protein | 3.67 | 2188 |
| 441553 | AA281219 | Hs.121296 | ESTs | 4.46 | 3357 |
| 431070 | AW408164 | Hs.249184 | transcription factor 19 (SC1) | 2.87 | 2529 |
| 421254 | AK001724 | Hs.102950 | coat protein gamma-cop | 2.59 | 1496 |
| 451807 | W52854 | | hypothetical protein FLJ23293 similar to | 2.99 | 4249 |
| 411248 | AA551538 | Hs.69321 | Homo sapiens cDNA FLJ14408 fis, clone HE | 3.42 | 541 |
| 418054 | NM_002318 | Hs.83354 | Iysyl oxidase-like 2 | 2.50 | 1152 5001 |
| 452259 | AA317439 | Hs.28707 | signal sequence receptor, gamma (translo | 2.56 | 4290 |
| 423073 | BE252922 | Hs.123119 | MAD (mothers against decapentaplegic, Dr | 2.56 | 1715 |
| 407792 | AI077715 | Hs.39384 | putative secreted ligand homologous to f | 2.60 | 196 |
| 432078 | BE314877 | Hs.24553 | hypothetical protein FLJ12541 similar to | 3.57 | 2629 |
| 410553 | AW016824 | Hs.272068 | hypothetical protein MGC14128 | 4.37 | 491 |
| 418113 | AI272141 | Hs.83484 | SRY (sex determining region Y)-box 4 | 3.60 | 1161 |
| 413063 | AL035737 | Hs.75184 | chitinase 3-like 1 (cartilage glycoprote | 2.68 | 692 |
| 446557 | U68566 | Hs.15318 | HS1 binding protein | 2.60 | 3761 5669 |
| 416294 | D86980 | Hs.79170 | KIAA0227 protein | 2.71 | 4958 984 |
| 452613 | AA461599 | Hs.23459 | ESTs | 2.67 | 4329 |
| 431836 | AF178532 | Hs.271411 | beta-site APP-cleaving enzyme 2 | 2.53 | 2603 5491 |
| 417720 | AA205625 | Hs.208067 | ESTs | 2.58 | 1116 |
| 438915 | AA280174 | Hs.285681 | Williams-Beuren syndrome chromosome regi | 3.95 | 3178 |
| 429610 | AB024937 | Hs.211092 | LUNX protein; PLUNC (palate lung and nas | 7.69 | 2395 5415 |
| 409015 | BE389387 | Hs.49767 | NM_004553:Homo sapiens NADH dehydrogenas | 3.05 | 323 |
| 415279 | F04237 | Hs.1447 | glial fibrillary acidic protein | 4.05 | 923 |
| 448296 | BE622756 | Hs.10949 | Homo sapiens cDNA FLJ14162 fis, clove NT | 2.54 | 3956 |
| 418960 | NM_004494 | Hs.89525 | hepatoma-derived growth factor (HDGF) | 2.54 | 1263 5034 |
| 446204 | AI279809 | Hs.150019 | ESTs | 2.81 | 3735 |
| 413004 | T35901 | Hs.75117 | interleukin enhancer binding factor 2, 4 | 3.03 | 688 |
| 425944 | AK000654 | Hs.164256 | hypothetical protein FLJ20657 | 2.62 | 2013 5283 |
| 425057 | AA826434 | Hs.1619 | achaete-scute complex (Drosophila) homol | 4.87 | 1915 |
| 452461 | N78223 | Hs.108106 | transcription factor | 2.61 | 4311 |
| 453210 | AL133161 | Hs.32360 | hypothetical protein FLJ10867 | 2.69 | 4387 5772 |
| 411825 | AK000334 | | solute carrier family 39 (zinc transport | 4.19 | 4868 580 |
| 425234 | AW152225 | Hs.165909 | ESTs, Weakly similar to I38022 hypotheti | 3.15 | 1940 |
| 437016 | AU076916 | Hs.5398 | guanine monphosphate synthetase | 3.68 | 3027 |
| 407137 | T97307 | | gb:ye53h05.s1 Soares fetal liver spleen | 2.69 | 128 |
| 409757 | NM_001898 | Hs.123114 | cystatin SN | 3.47 | 403 4832 |
| 444706 | AK000398 | Hs.11747 | hypothetical protein FLJ20391 | 2.80 | 3621 5643 |
| 430393 | BE185030 | Hs.241305 | estrogen-responsive B box protein | 2.53 | 2480 |
| 452838 | U65011 | Hs.30743 | preferentially expressed antigen in mela | 6.17 | 4353 5765 |
| 447532 | AK000614 | Hs.18791 | hypothetical protein FLJ20607 | 2.66 | 3875 5690 |
| 424140 | Z48051 | Hs.141308 | myelin oligodendrocyte glycoprotein | 3.54 | 1809 5200 |
| 436217 | T53925 | Hs.107 | fibrinogen-like 1 | 4.92 | 2968 |
| 452833 | BE559681 | Hs.30736 | KIAA0124 protein | 3.80 | 4351 |
| 422765 | AW409701 | Hs.1578 | baculoviral IAP repeat-containing 5 (sur | 2.90 | 1680 |
| 443426 | AF098158 | Hs.9329 | chromosome 20 open reading frame 1 | 3.20 | 3523 5627 |
| 409269 | AA576953 | Hs.22972 | steroid 5 alpha-reductase 2-like; H5AR g | 4.09 | 358 |
| 422656 | AI870435 | Hs.1569 | LIM homeobox protein 2 | 3.01 | 1668 |
| 423551 | AA327598 | Hs.89633 | ESTs | 2.60 | 1757 |
| 409187 | AF154830 | Hs.50966 | carbamoyl-phosphate synthetase 1, mitoch | 4.21 | 347 4816 |
| 409557 | BE182896 | Hs.3686 | ESTs | 2.53 | 384 |
| 416984 | H38765 | Hs.80706 | diaphorase (NADH/NADPH) (cytochrome b-5 | 3.58 | 1047 |
| 442173 | N76101 | Hs.8127 | KIAA0144 gene product | 2.77 | 3402 |
| 408452 | AA054683 | Hs.192455 | ESTs, Weakly similar to ALU7_HUMAN ALU S | 4.18 | 268 |
| 428342 | AI739168 | | Homo sapiens cDNA FLJ13458 fis, clone PL | 2.79 | 2244 |
| 426691 | NM_006201 | Hs.171834 | PCTAIRE protein kinase 1 | 3.68 | 2088 5314 |
| 438956 | W00847 | Hs.135056 | Human DNA sequence from clone RP5-850E9 | 3.56 | 3180 |
| 456508 | AA502764 | Hs.123469 | ESTs, Weakly similar to AF208855 1 BM-01 | 2.93 | 4547 |
| 449027 | AJ271216 | Hs.22880 | dipeptidylpeptidase III | 2.95 | 4030 5719 |
| 431846 | BE019924 | Hs.271580 | uroplakin 1B | 3.78 | 2605 |
| 419741 | NM_007019 | Hs.93002 | ubiquitin carrier protein E2-C | 3.63 | 1355 5056 |
| 416361 | AW204907 | Hs.6872 | ESTs, Weakly similar to CA13_HUMAN COLLA | 2.94 | 989 |
| 407355 | AA846203 | Hs.193974 | ESTs, Weakly similar to ALU1_HUMAN ALU S | 2.60 | 155 |
| 424954 | NM_000546 | Hs.1846 | tumor protein p53 (Li-Fraumeni syndrome) | 2.77 | 1901 5238 |
| 407754 | AA527348 | Hs.288967 | Homo sapiens cDNA FLJ14105 fis, clone MA | 3.20 | 190 |
| 419875 | AA853410 | Hs.93557 | proenkephalin | 3.46 | 1365 |
| 413437 | BE313164 | Hs.75361 | gene from NF2/meningioma region of 22q12 | 2.54 | 722 |
| 417389 | BE260964 | Hs.82045 | midkine (neurite growth-promoting factor | 3.09 | 1091 |
| 444381 | BE387335 | Hs.283713 | hypothetical protein BC014245 | 2.80 | 3593 |
| 453968 | AA847843 | Hs.62711 | High mobility group (nonhistone chromoso | 5.29 | 4456 |
| 427954 | J03060 | Hs.247551 | metaxin 1 | 3.30 | 2206 |
| 438746 | AI885815 | Hs.184727 | Human melanoma-associated antigen p97 (m | 2.57 | 3164 |
| 422168 | AA586894 | Hs.112408 | S100 calcium-binding protein A7 (psorias | 2.73 | 1612 |
| 425842 | AI587490 | Hs.159623 | NK-2 (Drosophila) homolog B | 3.17 | 2002 |
| 448993 | AI471630 | | KIAA0144 gene product | 2.70 | 4023 |
| 428004 | AA449563 | Hs.151393 | glutamate-cysteine ligase, catalytic sub | 2.69 | 2213 |
| 425848 | BE242709 | Hs.159637 | valyl-tRNA synthetase 2 | 3.79 | 2004 |
| 424458 | M29273 | Hs.1780 | myelin associated glycoprotein | 2.69 | 1848 5213 |
| 419078 | M93119 | Hs.89584 | insulinoma-associated 1 | 5.07 | 1272 5036 |
| 430294 | AI538226 | Hs.32976 | guanine nucleotide binding protein 4 | 2.82 | 2463 |
| 429922 | Z97630 | Hs.226117 | H1 histone family, member 0 | 2.52 | 2427 5430 |
| 409103 | AF251237 | Hs.112208 | XAGE-1 protein | 7.18 | 333 4812 |
| 424629 | M90656 | Hs.151393 | glutamate-cysteine ligase, catalytic sub | 3.19 | 1865 5221 |
| 414313 | NM_004371 | Hs.75887 | coatomer protein complex, subunit alpha | 2.55 | 4916 809 |
| 416138 | C18946 | Hs.79026 | myeloid leukemia factor 2 | 2.50 | 976 |
| 434067 | H18913 | Hs.124023 | Homo sapiens cDNA FLJ14218 fis, clone NT | 5.38 | 2812 |
| 411908 | L27943 | Hs.72924 | cytidine deaminase | 3.32 | 4869 585 |
| 428484 | AF104032 | Hs.184601 | solute carrier family 7 (cationic amino | 2.57 | 2265 5364 |
| 422095 | AI868872 | Hs.282804 | hypothetical protein FLJ22704 | 2.83 | 1603 |
| 430791 | AA486293 | Hs.272068 | ESTs, Weakly similar to ALU3_HUMAN ALU S | 3.14 | 2513 |
| 428839 | AI767756 | Hs.82302 | Homo sapiens cDNA FLJ14814 fis, clone NT | 2.51 | 2310 |
| 424481 | R19453 | Hs.1787 | proteolipid protein 1 (Pelizaeus-Merzbac | 2.66 | 1851 |
| 447342 | AI199268 | Hs.19322 | Homo sapiens, Similar to RIKEN cDNA 2010 | 2.74 | 3845 |
| 417900 | BE250127 | Hs.82906 | CDC20 (cell division cycle 20, S. cerevi | 3.04 | 1136 |
| 411305 | BE241596 | Hs.69547 | myelin basic protein | 4.08 | 546 |
| 406690 | M29540 | Hs.220529 | carcinoembryonic antigen-related cell ad | 3.07 | 4748 86 |
| 418738 | AW388633 | Hs.6682 | solute carrier family 7, (cationic amino | 4.00 | 1234 |
| 427344 | NM_000869 | Hs.2142 | 5-hydroxytryptamine (serotonin) receptor | 4.24 | 2145 5336 |
| 433447 | U29195 | Hs.3281 | neuronal pentraxin II | 2.98 | 2764 5536 |
| 419395 | BE268326 | Hs.90280 | 5-aminoimidazole-4-carboxamide ribonucle | 3.04 | 1310 |
| 424420 | BE614743 | Hs.146688 | prostaglandin E synthase | 3.54 | 1842 |

Pkey: Unique Eos probeset identifier number
ExAccn: Exemplar Accession number, Genbank accession number
UniGeneID: UniGene number
UniGene Title: UniGene gene title
R1: 90th percentile of lung metastases to the brain Als divided by the 90th percentile of normal body tissues Als, where the 15th percentile of all normal body tissue Als was subtracted from the numerator and denominator.
SEQ ID NO(s): SEQ ID number(s) for nucleic acid and protein sequences associated with table entry.

[0356] TABLE 7B

| Pkey | CAT number | Accession |
|---|---|---|
| 450726 | 666520_1 | AI732297 AW204600 T95017 |
| 421798 | 3042_4 | BC017829 AW276646 AI984209 AA663933 AA634104 AA551528 AA634041 |
| | | AA298038 BG483990 T89297 BF853958 H64685 T90329 T60644 T57747 BF852694 T92529 |
| | | BG482852 BF883064 BF883066 N74880 AA829796 N90716 |
| 454453 | 8582_4 | BF313069 BE879305 AW752781 AW752727 AW752559 AW752578 AW752584 |
| | | BF846118 AL545903 BF846115 AL525361 |
| 400245 | 12188_1 | X79449 BC017853 AL121035 BF196384 AW119044 AI028023 AW451110 |
| | | AI971911 AW015069 AI079170 AI376367 AI264113 AA829646 AA737579 AA449679 AA740864 |
| | | NM_001111 U18121 AL567297 BG773801 BF973874 AV687104 AA527579 AA843525 |
| | | BE706355 AI074589 AI523475 BE890249 AW406263 BE074258 AV729485 BF809610 |
| | | BG058619 AA677244 BE179838 AA622264 AI460106 AA740411 AI499168 AI078223 AI682923 |
| | | BE696559 AW375385 AA788739 BG984978 Z40874 T17054 F09669 AW844043 U10439 |
| | | BI711870 AW245957 AU158567 AA679305 AA679316 W72510 AI346029 BG059762 AW251062 |
| | | AA132373 AI925621 AI860230 AI340172 AW192891 AI707980 AI094937 AI042115 AI200901 |
| | | BE328452 AA644678 AA551209 BE351065 AA970761 N68609 AW002028 AA160826 AI422774 |
| | | AW873114 AW073597 AW664483 AI218710 AW020550 AW190607 AI984545 AI871921 |
| | | AI333970 AI452887 AI818335 AA398655 AI554424 AI274187 BE465703 AW512940 AW241366 |
| | | AI923954 AA576649 AW168294 AA813181 AA912168 AI049738 AW514073 AA548255 AI569630 |
| | | BE710031 AA244182 AI341697 AA563904 AI537990 AW517908 AW172943 Z39498 AI750294 |
| | | AW150414 AI253293 BE825720 T31860 AW150775 D20310 AA150892 AU133933 BE781148 |
| | | AL038957 BF910979 AA352297 BG988142 AW372175 BF229106 AW866705 BE093482 BG990396 |
| | | AI499917 AA054452 H05484 AI828502 BM467331 AU140570 AL135417 BF947202 AW391926 |
| | | BE813418 BF998473 T92021 BI021048 BM048783 AW501366 AW501342 AW501549 BE939021 |
| | | BE707147 BE160974 BE305207 N49011 AA947119 AA678801 BE536876 AW897428 BG329648 |
| | | BG818540 BE542344 BI919250 BI253018 AW130996 BE074249 BE895428 BI034862 BE083277 |
| | | BF952166 |
| 429978 | 35194_2 | BE738425 BE738323 BM126944 AW629678 AW265195 AI916735 AI394255 AI573090 |
| | | AI354442 AW612857 AI339558 AI919424 AI377532 AI354441 AI308821 AA772275 AW055215 |
| | | AI589705 AI336532 AA806547 AV682125 H93575 AW071172 AW769904 AI863985 AW265018 |
| | | AW196655 D79662 BE042393 N75017 AW014741 C75509 BE748621 H92431 AW079261 |
| | | AW901780 AA329482 AW960115 BI260621 AI767525 R31663 BI918664 AW963196 C06195 |
| | | AI678018 |
| 400213 | 6901_3 | D63478 NM_014847 BG756716 BG163437 BM463199 BG403203 AA401857 |
| | | AA368774 AW408251 AL523107 BG026453 BF674703 AA604407 N29680 AA648135 AI288204 |
| | | AI288200 AA594851 AI969057 BF033736 BI334216 BE925408 AI557055 BF328153 AI885038 |
| | | AV743562 AW152023 AI678636 AI990677 AA911648 AI184369 AI830103 AA259120 AI924057 |
| | | BG152397 AI695208 H71871 BI259526 T18975 BI259531 BF229650 |
| 447349 | 1063443_1 | BE743847 AW809603 BM469626 AI375546 |
| 400203 | 11774_1 | NM_002794 D26599 BM469989 BF305151 BG821966 BI089030 AW007738 |
| | | BI222910 BM049422 BG028749 AI189162 AI831230 AW131497 BM272215 BE791105 AW778828 |
| | | AA479594 AA480133 AA131997 AA284572 AA453009 BF928258 AA152127 AA393918 |
| | | BF765307 BE247542 BF934697 BF341798 BE253409 AA470620 AI828932 AW379902 AV762678 |
| | | AV741784 AV760892 AI025755 AA878562 AA630630 AA761708 AA862518 AA865831 AA862947 |
| | | N53065 AA131821 AA293499 N23342 N26856 AI147346 AW951549 AA772963 BE245986 |
| | | BG208493 AI831666 BG474873 BI023168 AU149647 BG197069 BG191102 BF304178 BE536135 |
| | | AA706900 AA443583 AI002710 AW276192 AU149842 BG214797 BG198193 AW197923 AW627799 |
| | | T98663 BG194788 BG214656 BF345258 BG716363 AI066528 BI546220 AA393815 AA132004 |
| | | AA353826 H97858 BG187823 BF841463 AI351714 AV735966 BG196439 BG216840 BG198438 |
| | | BG400762 |
| 456031 | 6000_2 | BG469257 BM042651 AW772237 AI858055 AW043820 AI804955 AW028151 AI887909 |
| | | AI582191 AI798900 AI299745 BF058971 BE504708 AW001777 BF000316 AW001248 AI336325 |
| | | AI805058 AI923922 BM054790 AI949719 AI741492 AI684429 AI276119 AI269740 AI183994 |
| | | AI719036 AA480650 AW263563 AI971175 AI347141 BF973966 AA480684 AI097473 AI580934 |
| | | AI200633 BF058119 AW672804 AI348656 BF732192 AW517972 AI262960 M62028 N42455 |
| | | BM050656 AA595104 AI074858 AA627913 AI304384 AW900999 AA365138 N66329 |
| | | AI648474 AA642939 AI474817 AI054319 W25028 AA863058 BG469176 AA321296 BE778988 |
| | | AI262696 BF026236 AW205513 AW594574 AA922438 W68465 BF684267 BF591011 |
| | | AA367149 BG896411 AW243042 BI335118 BF915906 BF915905 BG338858 AI813670 |
| | | AW819595 AW243178 AW819644 AW136076 AI810972 BF476651 AW515899 BE936236 |
| | | BE905314 AI242330 |
| 406685 | 0_0 | M18728 |
| 458748 | 701190_1 | AI381530 BG942599 AW270510 AW265104 |
| 415989 | 10194_1 | BC013389 BC017398 AI023543 AA191424 AI267700 AI469633 AW958465 AW953397 |
| | | AA172056 BE940298 BF909208 BF909980 BF095153 BG285837 AI720344 BF541715 |
| | | AA355086 AA172236 |
| 441128 | 20932_1 | BC014072 BE328850 AI356567 AI148171 AI022165 BG149661 BF000671 AA233101 |
| | | AA573721 AA447991 AW016855 AI005068 AA554071 BF478215 AA906902 AW014761 |
| | | BE905651 BE512923 BM047129 AA243852 AA232991 AA127550 AA127551 AA570256 |
| | | AI473237 BF033706 N90525 AW973623 AI359627 BG674574 BE903322 |
| 430677 | 11749_1 | NM_001943 Z26317 BG750290 BM043721 AW361908 BG494570 AW996792 |
| | | BF915903 AW753487 BI335109 BE018413 BE874074 BF333555 BI016581 BI014002 |
| | | BI015917 BE731644 BE927177 BE697899 BF999996 BF929423 BG951608 AW858747 |
| | | AW858755 AW858750 AW858749 AW858751 AW363742 D58979 BE003946 AW858999 |
| | | BG951830 AW859003 BF738953 AW369461 AW363740 AW998641 BG978975 BG015802 |
| | | AW991316 |
| 427239 | 20459_2 | AL532360 BE794750 AA582906 AI015067 AW271034 BG271636 AW075177 AW071374 |
| | | AI345565 AI307208 BE138953 BE049086 AI334881 AW075006 AW075181 AA464019 |
| | | AW302733 AW075100 AW073433 AI802854 AI334909 AI802853 AI345036 AI348921 |
| | | AI340734 AI307478 AI251289 AW302327 AW072520 AI312145 AW073656 AW072513 |
| | | AW071289 AI307559 AA876186 T29587 AI307493 AI255068 AI252868 AI252839 |
| | | AW074809 AI252926 AI252160 AI251662 AI251262 AI610913 AI270787 AI270156 |
| | | AI252075 AW073469 AW072901 AW072496 AW071420 AI305762 AI254764 AI802837 |
| | | AI251264 AW073049 AW071311 AI340643 BE138965 BE138502 AW073456 |
| | | AI334733 AI054335 BE139260 AI054302 AI054060 AI054057 AI053722 AI289711 |
| | | BE139228 AW470478 AW271039 AW302085 BE041872 AI254494 AI271496 AI252427 |
| | | BF718773 BF718645 AW074866 BE857822 |
| 429228 | 215430_1 | BG676155 BM009591 AI479075 AI025794 AI017967 AA448270 BE466812 AA853422 |
| | | AI392649 BG952034 AA513384 BF840124 BE714620 AW969605 AI553633 |
| 451807 | 17758_2 | BM479185 AL552795 AL577722 BF038888 BM127617 BF510346 AW450652 AA865478 |
| | | AW449519 BM127314 AI806539 AW449522 AA993634 AI827626 AA904788 |
| 411825 | 7891_1 | AK000695 AK000489 BC001688 BG235988 AW006329 AI887644 AI207230 AI148213 |
| | | AI304333 AI634653 AW662636 AI281247 AA946921 AA424487 BE272330 AI830588 |
| | | AA159183 AA977141 BG231801 AA631793 AA975194 BF817537 AA477798 BI906631 |
| | | AW083424 AA625199 NM_017767 AK000334 BF964048 AW815634 AL573992 |
| | | AA430612 AA928390 AA464447 AW340827 AA424290 AI927759 BG951502 AW881353 BI765535 |
| 428342 | 6712_1 | AK056315 AI015524 AA724079 BI713619 AI377728 AW293682 AI928140 AI092404 AI085630 |
| | | AA731340 BM469629 AW968804 AA425658 AA769094 BF446026 AW118719 AI332765 |
| | | AW500888 AW576556 AI859571 AW499664 AW614573 AW629495 AW505314 W74704 |
| | | AI356361 AI923640 AW070509 AI521500 AL042095 AA609309 AA761319 AI381489 |
| | | H45700 AA761333 AW265424 AA909524 AA635311 AA649040 AI392620 Z40708 |
| | | AI985564 AW263513 AA913892 AI693486 AW263502 AI806164 AW291137 BI061872 |
| | | BI059498 AA134476 AW084888 AA036967 AW370823 T55263 BI002756 AA489664 |
| | | BF827261 W74741 BF963166 |
| 448993 | 9350_1 | BE734790 BE797215 BG759420 AW407710 BG325963 BI918794 BE278238 BI199200 BI518986 |
| | | BI253338 BI262043 AW340858 BF375322 AI982791 AI567270 BF095628 BF095497 AI813332 |
| | | BF766170 BF431658 R69173 AA454908 AA394063 AA346417 AA346416 D20284 AA053597 |
| | | BI765427 BI819610 BM148877 AA293504 AA427705 AA399460 AA454833 AA292343 AA730380 |

Pkey: Unique Eos probeset identifier number
CAT number: Gene cluster number
Accession: Genbank accession numbers

[0357] TABLE 7C

| Pkey | Ref | Strand | Nt_position |
|---|---|---|---|
| 401131 | 8699812 | Minus | 94802-94987, 95804-95887, |
| | | | 96323-96487, 9759 |
| 402496 | 9797769 | Minus | 8615-9103 |
| 401451 | 6634068 | Minus | 119926-121272 |
| 404440 | 7528051 | Plus | 80430-81581 |
| 404996 | 6007890 | Plus | 37999-38145, 38652-38998, |
| | | | 39727-39872, 4055 |
| 405770 | 2735037 | Plus | 61057-62075 |

Pkey: Unique number corresponding to an Eos probeset
Ref: Sequence source. The 7 digit numbers in this column are Genbank Identifier (GI) numbers. “Dunham I. et at.” refers to the publication entitled “The DNA sequence of human chromosome 22.” Dunham I. et al., Nature (1999) 402: 489-495.
Strand: Indicates DNA strand from which exons were predicted.
Nt_position: Indicates nucleotide positions of predicted exons.

[0358] TABLE 8A
About 330 genes upregulated in lung metastases to the brain relative to primary lung tumors

| Pkey | ExAccn | UniGeneID | UniGene Title | R1 | SEQ ID NO(s): |
|---|---|---|---|---|---|
| 425751 | T19239 | Hs.1940 | crystallin, alpha B | 23.50 | 1993 |
| 411305 | BE241596 | Hs.69547 | myelin basic protein | 22.59 | 546 |
| 424481 | R19453 | Hs.1787 | proteolipid protein 1 (Pelizaeus-Merzbac | 20.10 | 1851 |
| 407100 | R29657 | | gb:F1-1179D 22 week old human fetal live | 12.12 | 122 |
| 454034 | NM_000691 | Hs.575 | aldehyde dehydrogenase 3 family, member | 7.30 | 4462 5792 |
| 441899 | AI372588 | Hs.8022 | TU3A protein | 6.99 | 3378 |
| 440747 | AW297226 | Hs.137840 | ESTs, Moderately similar to SIX4_HUMAN H | 6.50 | 3316 |
| 445519 | AI635202 | Hs.170132 | hypothetical protein FLJ22494 | 6.41 | 3681 |
| 456940 | H46986 | Hs.31861 | ESTs | 6.04 | 4569 |
| 424378 | W28020 | Hs.167988 | neural cell adhesion molecule 1 | 5.89 | 1837 |
| 412754 | AW160375 | Hs.74565 | amyloid beta (A4) precursor-like protein | 5.76 | 666 |
| 440889 | R76274 | Hs.28507 | ESTs | 5.67 | 3320 |
| 415279 | F04237 | Hs.1447 | glial fibrillary acidic protein | 5.61 | 923 |
| 449383 | AW444712 | Hs.196573 | ESTs | 5.53 | 4060 |
| 424458 | M29273 | Hs.1780 | myelin associated glycoprotein | 5.40 | 1848 5213 |
| 419078 | M93119 | Hs.89584 | insulinoma-associated 1 | 5.36 | 1272 5036 |
| 409327 | L41162 | Hs.53563 | collagen, type IX, alpha 3 | 5.10 | 361 4822 |
| 425988 | BE045897 | Hs.53985 | ESTs, Weakly similar to I38022 hypotheti | 5.05 | 2016 |
| 412708 | R26830 | Hs.106137 | ESTs, Weakly similar to CGHU7L collagen | 4.97 | 661 |
| 405499 | | | NM_020638*:Homo sapiens fibroblast growt | 4.75 | 4737 71 |
| 426784 | U03749 | Hs.172216 | chromogranin A (parathyroid secretory pr | 4.75 | 2098 5319 |
| 454293 | H49739 | Hs.134013 | ESTs, Moderately similar to HK61_HUMAN H | 4.72 | 4475 |
| 406536 | | | Target Exon | 4.63 | |
| 424140 | Z48051 | Hs.141308 | myelin oligodendrocyte glycoprotein | 4.59 | 1809 5200 |
| 431846 | BE019924 | Hs.271580 | uroplakin 1B | 4.57 | 2605 |
| 422656 | AI870435 | Hs.1569 | LIM homeobox protein 2 | 4.52 | 1668 |
| 419875 | AA853410 | Hs.93557 | proenkephalin | 4.51 | 1365 |
| 435504 | W26415 | | gb:29c7 Human retina cDNA randomly prime | 4.50 | 2921 |
| 435652 | N32388 | Hs.334370 | uncharacterized hypothalamus protein HBE | 4.49 | 2935 |
| 404608 | | | Homo sapiens cDNA FLJ11027 fis, clone PL | 4.47 | |
| 440700 | AW952281 | Hs.296184 | guanine nucleotide binding protein (G pr | 4.47 | 3313 |
| 409788 | AW502154 | Hs.57760 | hypothetical protein FLJ23119; KIAA1790 | 4.46 | 406 |
| 404502 | | | Target Exon | 4.43 | |
| 429401 | AW296102 | Hs.99272 | ESTs, Weakly similar to S32567 A4 protei | 4.41 | 2364 |
| 425855 | AF135025 | Hs.159679 | kallikrein 12 | 4.37 | 2006 5280 |
| 414215 | BE262191 | Hs.142003 | ESTs | 4.36 | 802 |
| 431934 | AB031481 | Hs.272214 | STG protein | 4.32 | 2619 5496 |
| 432351 | AI270313 | Hs.127762 | hypothetical protein MGC12982 | 4.31 | 2659 |
| 423011 | NM_000683 | Hs.123022 | adrenergic, alpha-2C-, receptor | 4.31 | 1710 5166 |
| 403233 | | | C2001664*:gi\|9944235\|emb\|CAC05418.1\|(AJ | 4.28 | |
| 402000 | | | C17000761:gi\|4506525\|ref\|NP_003952.1\|rh | 4.25 | |
| 448677 | AI560769 | | ESTs | 4.22 | 3996 |
| 433447 | U29195 | Hs.3281 | neuronal pentraxin II | 4.22 | 2764 5536 |
| 410028 | AW576454 | | ESTs | 4.19 | 433 |
| 404672 | | | Target Exon | 4.11 | |
| 431083 | AF110400 | Hs.249200 | fibroblast growth factor 19 | 4.07 | 2530 5469 |
| 424922 | BE386547 | Hs.217112 | hypothetical protein MGC10825 | 4.06 | 1900 |
| 416072 | AL110370 | Hs.79000 | growth associated protein 43 | 4.00 | 970 |
| 414323 | NM_014759 | Hs.334688 | KIAA0273 gene product | 3.99 | 4918 811 |
| 415314 | N88802 | Hs.5422 | glycoprotein M6B | 3.97 | 925 |
| 416340 | N31772 | Hs.79226 | fasciculation and elongation protein zet | 3.97 | 988 |
| 452023 | AB032999 | Hs.27566 | KIAA1173 protein | 3.96 | 4264 5753 |
| 407450 | AJ006520 | | gb:Homo sapiens mRNA for m1 muscarinic a | 3.94 | 163 4771 |
| 426344 | H41821 | Hs.322469 | transcriptional activator of the c-fos p | 3.92 | 2055 |
| 436551 | AI888055 | Hs.34198 | ESTs | 3.91 | 2991 |
| 422756 | AA441787 | Hs.119689 | glycoprotein hormones, alpha polypeptide | 3.89 | 1679 |
| 425690 | AW862317 | Hs.47974 | ESTs, Moderately similar to JC4969 pig-c | 3.88 | 1988 |
| 427207 | AF012131 | Hs.173984 | T-box 1 | 3.88 | 2131 5333 |
| 425057 | AA826434 | Hs.1619 | achaete-scute complex (Drosophila) homol | 3.81 | 1915 |
| 420320 | AB002361 | Hs.96633 | KIAA0363 protein | 3.78 | 1411 5073 |
| 406121 | | | Target Exon | 3.78 | |
| 402356 | | | C19000583*:gi\|7295202\|gb\|AAF50525.1\| (AE | 3.77 | |
| 447028 | AI973128 | Hs.167257 | brain link protein-1 | 3.77 | 3813 |
| 414063 | H26904 | Hs.75736 | apolipoprotein D | 3.76 | 783 |
| 423073 | BE252922 | Hs.123119 | MAD (mothers against decapentaplegic, Dr | 3.75 | 1715 |
| 408748 | J05500 | Hs.47431 | spectrin, beta, erythrocytic (includes s | 3.73 | 302 4806 |
| 422357 | AF016272 | Hs.115418 | cadherin 16, KSP-cadherin | 3.73 | 1634 5148 |
| 449227 | AJ403106 | Hs.121824 | ESTs | 3.70 | 4048 |
| 425450 | U14755 | Hs.157449 | LIM homeobox protein 1 | 3.69 | 1965 5264 |
| 419555 | AA244416 | | gb:nc07d11.s1 NCI_CGAP_Pr1 Homo sapiens | 3.69 | 1331 |
| 438944 | AA302517 | Hs.92732 | KIAA1444 protein | 3.68 | 3179 |
| 433932 | AW954599 | Hs.169330 | neuronal protein | 3.66 | 2800 |
| 413946 | BE185066 | Hs.2055 | gb:MR1-HT0709-100500-002-c09 HT0709 Homo | 3.65 | 767 |
| 406273 | | | peptidylglycine alpha-amidating monooxyg | 3.62 | |
| 427993 | AA418483 | Hs.104806 | ESTs | 3.62 | 2212 |
| 438743 | AW664029 | Hs.129496 | ESTs | 3.57 | 3163 |
| 447868 | AI434802 | Hs.196071 | ESTs | 3.56 | 3916 |
| 450875 | AK000724 | | karyopherin alpha 6 (importin alpha 7) | 3.55 | 4172 |
| 457842 | AJ251759 | Hs.283846 | Homo sapiens GNAS1 antisense transcript | 3.54 | 4602 |
| 404033 | | | C5000413*:gi\|202800\|gb\|AAA40703.1\| (M647 | 3.54 | |
| 423473 | H49104 | Hs.129888 | hypothetical protein FLJ14768 | 3.53 | 1750 |
| 446639 | AI016826 | Hs.342148 | ESTs | 3.51 | 3774 |
| 421074 | AI690321 | Hs.203845 | two pore potassium channel KT3.3 | 3.51 | 1478 |
| 422440 | NM_004812 | Hs.116724 | aldo-keto reductase family 1, member B10 | 3.50 | 1647 5151 |
| 441030 | AW204139 | Hs.174424 | ESTs, Weakly similar to para-aminohippur | 3.50 | 3328 |
| 421771 | NM_001224 | Hs.108131 | caspase 2, apoptosis-related cysteine pr | 3.50 | 1561 5121 |
| 423420 | AI571364 | Hs.128382 | Homo sapiens mRNA; cDNA DKFZp76111224 (f | 3.48 | 1743 |
| 401980 | | | Target Exon | 3.46 | |
| 400739 | | | ENSP00000240971:Voltage-gated potassium | 3.45 | |
| 409915 | AA701921 | Hs.188436 | ESTs | 3.44 | 417 |
| 402560 | | | NM_006610*:Homo sapiens mannan-binding I | 3.43 | 36 4705 |
| 406939 | M34515 | | gb:Human omega light chain protein 14.1 | 3.42 | 112 4758 |
| 401670 | | | Target Exon | 3.41 | |
| 420485 | AF218586 | Hs.288835 | cell death-inducing DFFA-like effector b | 3.40 | 1424 5077 |
| 414408 | BE294783 | Hs.279497 | hypothetical protein MGC4638 | 3.39 | 823 |
| 435060 | AI422719 | Hs.120873 | ESTs, Weakly similar to fork head like p | 3.39 | 2891 |
| 402206 | | | Target Exon | 3.37 | |
| 435763 | AI243929 | | ESTs | 3.37 | 2941 |
| 400307 | AF005081 | | Homo sapiens skin-specific protein (xp32 | 3.37 | 11 4684 |
| 429897 | AA460370 | Hs.103189 | lipopolysaccharide specific response-68 | 3.34 | 2422 |
| 413333 | M74028 | Hs.75297 | fibroblast growth factor 1 (acidic) | 3.33 | 712 |
| 410939 | AW811324 | | gb:IL3-ST0141-131099-017-A02 ST0141 Homo | 3.32 | 522 |
| 433657 | AI244368 | Hs.1787 | PH domain containing protein in retina 1 | 3.31 | 2777 |
| 409702 | AI752244 | | eukaryotic translation elongation factor | 3.31 | 395 |
| 406131 | | | Target Exon | 3.31 | |
| 455973 | BE175424 | | gb:RC4-HT0578-170300-012-d01 HT0578 Homo | 3.30 | 4524 |
| 453169 | AB037815 | Hs.32156 | KIAA1394 protein | 3.30 | 4382 5771 |
| 415796 | R87548 | Hs.78854 | ATPase, Na? transporting, beta 2 polypep | 3.29 | 954 |
| 426039 | BE265133 | Hs.217493 | annexin A2 | 3.28 | 2021 |
| 419705 | AW368634 | Hs.154331 | ESTs | 3.27 | 1351 |
| 416916 | AW749469 | Hs.61784 | hypothetical protein FLJ14451 | 3.25 | 1036 |
| 405326 | | | Target Exon | 3.25 | |
| 420783 | AI659838 | Hs.99923 | lectin, galactoside-binding, soluble, 7 | 3.24 | 1453 |
| 418064 | BE387287 | Hs.83384 | S100 calcium-binding protein, beta (neur | 3.24 | 1155 |
| 423869 | BE409301 | Hs.134012 | C1q-related factor | 3.23 | 1782 |
| 436420 | AA443966 | Hs.31595 | ESTs | 3.23 | 2984 |
| 444039 | NM_016348 | Hs.10235 | chromosome 5 open reading frame 4 | 3.22 | 3569 5633 |
| 423897 | AB033062 | Hs.134970 | DKFZP434N178 protein | 3.22 | 1784 5189 |
| 452240 | AI591147 | Hs.61232 | ESTs | 3.21 | 4286 |
| 407208 | T10695 | | gb:hbc970 Human pancreatic islet Homo sa | 3.21 | 137 |
| 435538 | AB011540 | Hs.4930 | low density lipoprotein receptor-related | 3.21 | 2924 5565 |
| 454188 | AW177809 | | gb:IL3-HT0059-180899-007-C12 HT0059 Homo | 3.20 | 4471 |
| 408452 | AA054683 | Hs.192455 | ESTs, Weakly similar to ALU7_HUMAN ALU S | 3.20 | 268 |
| 423801 | NM_015071 | Hs.132942 | GTPase regulator associated with the foc | 3.19 | 1776 5188 |
| 458904 | NM_012155 | Hs.24178 | microtubule-associated protein like echi | 3.19 | 4645 5817 |
| 440274 | R24595 | Hs.7122 | scrapie responsive protein 1 | 3.18 | 3275 |
| 414961 | U27266 | Hs.927 | myosin-binding protein H | 3.18 | 4935 895 |
| 421511 | AA488940 | Hs.105216 | hypothetical protein FLJ11125 | 3.17 | 1530 |
| 401478 | | | Target Exon | 3.17 | |
| 451111 | W96141 | Hs.220687 | ESTs | 3.17 | 4195 |
| 409275 | F05689 | Hs.269257 | ESTs | 3.17 | 359 |
| 440109 | AK001138 | Hs.333149 | hypothetical protein FLJ10276 | 3.16 | 3264 5602 |
| 406907 | Z25427 | | gb:H. sapiens protein-serine/threonine ki | 3.16 | 107 4753 |
| 413166 | BE068507 | | gb:MR1-BT0371-070500-010-c11 BT0371 Homo | 3.15 | 697 |
| 455984 | BE177442 | | gb:RC1-HT0595-200400-012-f01 HT0595 Homo | 3.14 | 4525 |
| 414463 | T69078 | Hs.76177 | alpha-1-microglobulin/bikunin precursor | 3.13 | 832 |
| 406535 | | | Target Exon | 3.13 | |
| 430294 | AI538226 | Hs.32976 | guanine nucleotide binding protein 4 | 3.13 | 2463 |
| 423134 | AJ012582 | Hs.124161 | hyperpolarization activated cyclic nucle | 3.13 | 1720 5170 |
| 446598 | AW250546 | Hs.59317 | gb:2821774.5prime NIH_MGC_7 Homo sapiens | 3.12 | 3769 |
| 422637 | AA399024 | Hs.118836 | myoglobin | 3.12 | 1666 |
| 453439 | AI572438 | Hs.32976 | guanine nucleotide binding protein 4 | 3.11 | 4406 |
| 441251 | BE010471 | Hs.257747 | ESTs | 3.10 | 3340 |
| 454453 | AW752781 | | hypothetical protein FLJ12614 similar to | 3.10 | 4485 |
| 413570 | BE158651 | Hs.294022 | hypothetical protein FLJI4950 | 3.09 | 735 |
| 424098 | AF077374 | Hs.139322 | small proline-rich protein 3 | 3.08 | 1804 5199 |
| 403437 | | | C3001181*:gi\|12052997\|emb\|CAB66673.1\| (A | 3.08 | |
| 458579 | AI241355 | Hs.334604 | Homo sapiens mRNA for KIAA1870 protein, | 3.08 | 4628 |
| 453991 | AW014915 | Hs.273741 | ESTs | 3.07 | 4459 |
| 431912 | AI660552 | | ESTs, Weakly similar to A56154 AbI subst | 3.06 | 2615 |
| 401826 | | | Target Exon | 3.06 | |
| 410022 | AA079727 | | gb:zm20e09.r1 Stratagene pancreas (93720 | 3.05 | 430 |
| 420262 | AW964073 | Hs.58362 | hypothetical protein FLJ12681 | 3.05 | 1403 |
| 431917 | D16181 | Hs.2868 | peripheral myelin protein 2 | 3.04 | 2616 5494 |
| 448389 | AW188950 | Hs.345838 | ESTs | 3.04 | 3962 |
| 428830 | AC002115 | Hs.194061 | ets variant gene 2 | 3.03 | 2307 5380 |
| 447414 | D82343 | Hs.74376 | neuroblastoma (nerve tissue) protein | 3.02 | 3859 5687 |
| 407168 | R45175 | Hs.117183 | ESTs | 3.02 | 131 |
| 422010 | AA302049 | Hs.31181 | Homo sapiens cDNA: FLJ23230 fis, clone C | 3.02 | 1593 |
| 448191 | NM_005881 | Hs.20644 | branched chain alpha-ketoacid dehydrogen | 3.02 | 3950 5708 |
| 458963 | AI701393 | Hs.278728 | Rad and Gem-related 2 (rat homolog) | 3.01 | 4647 |
| 402409 | | | Target Exon | 3.00 | |
| 421048 | AI821593 | Hs.186669 | ESTs | 3.00 | 1476 |
| 417697 | R09609 | Hs.193118 | ESTs | 3.00 | 1114 |
| 433951 | AW274301 | Hs.165384 | ESTs | 3.00 | 2801 |
| 411908 | L27943 | Hs.72924 | cytidine deaminase | 3.00 | 4869 585 |
| 444828 | AI198680 | | gb:qf51f02.x1 Soares_testis_NHT Homo sap | 2.99 | 3632 |
| 451619 | AA018854 | | glutathione peroxidase 3 (plasma) | 2.98 | 4234 |
| 423515 | AA327017 | Hs.176594 | ESTs | 2.96 | 1754 |
| 441134 | W29092 | Hs.346950 | cellular retinoic acid-binding protein 1 | 2.95 | 3335 |
| 446204 | AI279809 | Hs.150019 | ESTs | 2.95 | 3735 |
| 431677 | AK000496 | Hs.306989 | hypothetical protein FLJ20489 | 2.94 | 2582 5485 |
| 434859 | BE255080 | Hs.299315 | collapsin response mediator protein-5; C | 2.94 | 2874 |
| 402220 | | | C19000596*:gi\|6755546\|ref\|NP_036107.1\|s | 2.94 | |
| 453629 | BE179903 | | gb:IL3-HT0618-110500-133-F09 HT0618 Homo | 2.93 | 4420 |
| 443219 | AI354669 | Hs.187461 | ESTs, Weakly similar to C29149 proline-r | 2.93 | 3509 |
| 413248 | T64858 | Hs.26966 | hypothetical protein DKFZp547J036 | 2.93 | 703 |
| 434067 | H18913 | Hs.124023 | Homo sapiens cDNA FLJ14218 fis, clone NT | 2.93 | 2812 |
| 400840 | | | Target Exon | 2.93 | |
| 404381 | | | Target Exon | 2.93 | |
| 424340 | AA339036 | Hs.7033 | ESTs | 2.93 | 1832 |
| 415651 | AI207162 | Hs.3815 | stathmin-like-protein RB3 | 2.91 | 942 |
| 447103 | AI361877 | Hs.270564 | ESTs, Weakly similar to pro alpha 1(I) c | 2.91 | 3821 |
| 453120 | AA292891 | Hs.31773 | pregnancy-induced growth inhibitor | 2.91 | 4375 |
| 456454 | T90789 | Hs.94308 | RAB35, member RAS oncogene family | 2.90 | 4543 |
| 424306 | AI863322 | Hs.192985 | ESTs, Weakly similar to KIAA0227 [H. sapi | 2.89 | 1826 |
| 449792 | AI568508 | Hs.239444 | ESTs, Weakly similar to JC5963 stable tu | 2.88 | 4084 |
| 408726 | BE046452 | Hs.255739 | ESTs, Weakly similar to Z205_HUMAN ZINC | 2.88 | 297 |
| 443906 | AA348031 | Hs.7913 | ESTs | 2.87 | 3562 |
| 418828 | AF020774 | Hs.88844 | Homo sapiens hair and skin epidermal-typ | 2.87 | 1246 |
| 425287 | R88249 | Hs.155524 | peanut (Drosophila)-like 2 | 2.86 | 1948 |
| 420767 | AF072711 | Hs.99918 | carboxyl ester lipase (bile salt-stimula | 2.86 | 1452 5086 |
| 417390 | AA196552 | Hs.85852 | hypothetical protein MGC3169 | 2.85 | 1092 |
| 437595 | AI028309 | Hs.114246 | ESTs | 2.85 | 3073 |
| 419663 | AA394208 | Hs.92198 | calcium-regulated heat-stable protein (2 | 2.84 | 1345 |
| 406320 | | | Target Exon | 2.84 | |
| 452263 | AA025116 | Hs.33333 | ESTs | 2.83 | 4291 |
| 433472 | AI541246 | Hs.3343 | phosphoglycerate dehydrogenase | 2.83 | 2765 |
| 420751 | J03019 | Hs.99913 | adrenergic, beta-1-, receptor | 2.83 | 1450 5085 |
| 454066 | X00356 | Hs.37058 | calcitonin/calcitonin-related polypeptid | 2.82 | 4467 5794 |
| 437926 | BE383605 | Hs.300816 | small GTP-binding protein | 2.81 | 3107 |
| 406881 | D16154 | | gb:Human gene for cytochrome P-450c11, e | 2.81 | 106 |
| 437745 | AI381515 | Hs.158381 | ESTs | 2.80 | 3086 |
| 425939 | AK001527 | Hs.163953 | hypothetical protein FLJ10665 | 2.80 | 2012 5282 |
| 407375 | AA091354 | | gb:II0815.seq.F Human fetal heart, Lambd | 2.80 | 158 |
| 427344 | NM_000869 | Hs.2142 | 5-hydroxytryptamine (serotonin) receptor | 2.79 | 2145 5336 |
| 430393 | BE185030 | Hs.241305 | estrogen-responsive B box protein | 2.79 | 2480 |
| 434607 | R70848 | Hs.163568 | ESTs | 2.78 | 2851 |
| 401940 | | | Target Exon | 2.78 | |
| 427693 | BE546832 | Hs.180370 | cofilin 1 (non-muscle) | 2.78 | 2182 |
| 429487 | M13077 | Hs.284255 | alkaline phosphatase, placental (Regan i | 2.77 | 2376 5409 |
| 413662 | BE155866 | Hs.25522 | KIAA1808 protein | 2.77 | 746 |
| 451179 | W05469 | Hs.31818 | ESTs | 2.77 | 4199 |
| 444643 | AW450739 | Hs.28077 | GDP-mannose pyrophosphorylase B | 2.77 | 3615 |
| 401504 | | | Target Exon | 2.77 | |
| 407570 | Z19002 | Hs.37096 | zinc finger protein 145 (Kruppel-like, e | 2.77 | 169 4775 |
| 453830 | AA534296 | Hs.20953 | ESTs | 2.76 | 4434 |
| 428342 | AI739168 | | Homo sapiens cDNA FLJ13458 fis, clone PL | 2.76 | 2244 |
| 440548 | AL117408 | Hs.7274 | DKFZP434P1750 protein | 2.76 | 3299 5609 |
| 433879 | AA613312 | Hs.291798 | ESTs | 2.76 | 2795 |
| 416530 | U62801 | Hs.79361 | kallikrein 6 (neurosin, zyme) | 2.76 | 1001 4963 |
| 404224 | | | Target Exon | 2.75 | |
| 409836 | AA077964 | | gb:7H12A01 Chromosome 7 HeLa cDNA Librar | 2.75 | 408 |
| 443665 | AV646058 | Hs.282325 | ESTs | 2.74 | 3535 |
| 431932 | AB015349 | Hs.22361 | Homo sapiens HRIHFB2063 mRNA, partial cd | 2.74 | 2617 5495 |
| 429545 | AI824164 | | lymphocyte antigen 6 complex, locus E | 2.74 | 2386 |
| 406979 | M85247 | | gb:H. sapiens dopamine D1A receptor gene, | 2.74 | 116 |
| 444506 | AI159863 | Hs.143713 | ESTs | 2.74 | 3603 |
| 419727 | AW160796 | Hs.92700 | DKFZP564O243 protein | 2.74 | 1353 |
| 409557 | BE182896 | Hs.3686 | ESTs | 2.73 | 384 |
| 452309 | AW206836 | Hs.224491 | ESTs | 2.73 | 4295 |
| 435814 | AW615179 | Hs.152870 | ESTs | 2.73 | 2947 |
| 442926 | AW014374 | Hs.144849 | ESTs | 2.73 | 3483 |
| 454360 | L78207 | Hs.54470 | ATP-binding cassette, sub-family C (CFTR | 2.72 | 4478 5796 |
| 425547 | AA359181 | | gb:EST68183 Fetal lung II Homo sapiens c | 2.72 | 1977 |
| 427587 | BE348244 | Hs.284239 | ESTs, Weakly similar to I78885 serine/th | 2.72 | 2170 |
| 421871 | AK001416 | Hs.306122 | glycoprotein, synaptic 2 | 2.71 | 1573 |
| 448045 | AJ297436 | Hs.20166 | prostate stem cell antigen | 2.71 | 3937 5706 |
| 442257 | AW503831 | | Human EST clone 25267 mariner transposon | 2.71 | 3407 |
| 441834 | AL138034 | Hs.7979 | KIAA0736 gene product | 2.71 | 3374 |
| 425211 | M18667 | Hs.1867 | progastricsin (pepsinogen C) | 2.71 | 1936 5251 |
| 447128 | AI271898 | | cyclin K | 2.70 | 3825 |
| 408115 | AB033107 | Hs.42796 | KIAAI281 protein | 2.70 | 236 4789 |
| 407394 | AF005081 | | gb:Homo sapiens skin-specific protein (x | 2.70 | 162 4770 |
| 445570 | AW239531 | Hs.102367 | HMG-box transcription factor TCF-3 | 2.70 | 3685 |
| 405060 | | | Target Exon | 2.70 | |
| 403016 | | | C21000452*:gi\|7657283\|ref\|NP_056623.1\| k | 2.68 | |
| 420037 | BE299598 | Hs.135569 | hypothetical protein FLJ14708 | 2.68 | 1376 |
| 401007 | | | ENSP00000227594*:FLJ00043 protein (Fragm | 2.67 | |
| 423942 | AF209704 | Hs.169407 | glycolipid transfer protein | 2.67 | 1785 5190 |
| 453210 | AL133161 | Hs.32360 | hypothetical protein FLJ10867 | 2.67 | 4387 5772 |
| 429259 | AA420450 | Hs.292911 | Plakophilin | 2.67 | 2344 |
| 400524 | | | Target Exon | 2.66 | |
| 453017 | R84301 | Hs.31387 | DKFZP564J0123 protein | 2.66 | 4367 |
| 414213 | BE297765 | | gb:601176246F1 NIH_MGC_17 Homo sapiens c | 2.66 | 801 |
| 416056 | H18056 | Hs.6829 | Homo sapiens mRNA for KIAA1644 protein, | 2.65 | 968 |
| 438245 | AL137688 | Hs.6132 | copine VI (neuronal) | 2.65 | 3127 |
| 425256 | BE297611 | Hs.155392 | collapsin response mediator protein 1 | 2.65 | 1945 |
| 416413 | H53930 | Hs.35354 | ESTs | 2.65 | 995 |
| 412595 | AA113749 | | gb:zn66d07.r1 Stratagene HeLa cell s3 93 | 2.65 | 650 |
| 428439 | BE467359 | Hs.24986 | ESTs | 2.65 | 2258 |
| 411830 | BE549420 | Hs.173497 | Sec23 (S. cerevisiae) homolog B | 2.64 | 581 |
| 417343 | AA197132 | Hs.231581 | myosin, heavy polypeptide 1, skeletal mu | 2.64 | 1083 |
| 447582 | BE293520 | Hs.18910 | prostate cancer overexpressed gene 1 | 2.64 | 3883 |
| 427627 | R87582 | Hs.179915 | guanine nucleotide binding protein (G pr | 2.64 | 2174 |
| 417852 | AJ250562 | Hs.82749 | transmembrane 4 superfamily member 2 | 2.63 | 1130 4994 |
| 446924 | AW134643 | | EST | 2.63 | 3801 |
| 429024 | AI652297 | Hs.119302 | complement-c1q tumor necrosis factor-rel | 2.62 | 2326 |
| 407846 | AA426202 | Hs.40403 | Cbp/p300-interacting transactivator, wit | 2.62 | 208 |
| 426328 | AW631296 | Hs.123933 | gb:hh83c09.y1 NCI_CGAP_GU1 Homo sapiens | 2.62 | 2053 |
| 400789 | | | C11001367*:gi\|1076205\|pir∥S50754 hypoth | 2.61 | |
| 402792 | | | Target Exon | 2.61 | |
| 400655 | | | Target Exon | 2.61 | |
| 401496 | | | Target Exon | 2.60 | |
| 401663 | | | Target Exon | 2.60 | |
| 431056 | BE616373 | Hs.249163 | fatty acid hydroxylase | 2.60 | 2528 |
| 407027 | U63312 | | gb:Human cosmid LL12NC01-242E1, ETV6 gen | 2.60 | 120 4763 |
| 412659 | AW753865 | Hs.74376 | olfactomedin related ER localized protei | 2.60 | 656 |
| 422927 | AW247388 | Hs.301423 | calcium binding protein 1 (calbrain) | 2.59 | 1693 |
| 409108 | AA339443 | Hs.48793 | sialyltransferase 6 (N-acetyllacosaminid | 2.59 | 334 |
| 425001 | U55184 | Hs.154145 | hypothetical protein FLJ11585 | 2.59 | 1908 5241 |
| 457131 | AC002310 | Hs.301463 | Human Chromosome 16 BAC close CIT987SK-A | 2.59 | 4579 5810 |
| 432941 | W04803 | Hs.279851 | hypothetical protein FLJ10241 | 2.59 | 2713 |
| 416889 | AW250318 | Hs.80395 | mal, T-cell differentiation protein | 2.59 | 1034 |
| 437800 | AA897636 | Hs.159366 | ESTs | 2.58 | 3092 |
| 401815 | | | Target Exon | 2.58 | |
| 423849 | AL157425 | Hs.133315 | Homo sapiens mRNA; cDNA DKFZp761J1324 (f | 2.58 | 1780 |
| 419272 | AA663904 | Hs.89862 | TNFRSF1A-associated via death domain | 2.58 | 1297 |
| 402978 | | | Target Exon | 2.57 | |
| 428931 | AA994979 | Hs.98967 | ATPase, H()-transporting, lysosomal, non | 2.57 | 2317 |
| 444613 | H29627 | Hs.79092 | hypothetical protein FLJ14427 | 2.57 | 3613 |
| 441087 | AI797588 | | ESTs | 2.57 | 3332 |
| 409870 | AW502321 | | gb:UI-HF-BR0p-ajs-e-05-0-UI.r1 NIH_MGC_5 | 2.57 | 410 |
| 438870 | AF075011 | | gb:Homo sapiens full length insert cDNA | 2.57 | 3172 |
| 439340 | AB032436 | Hs.6535 | brain-specific Na-dependent inorganic ph | 2.56 | 3200 5598 |
| 439671 | AW162840 | Hs.6641 | kinesin family member 5C | 2.56 | 3227 |
| 439285 | AL133916 | | hypothetical protein FLJ20093 | 2.56 | 3196 |
| 407561 | BE313226 | Hs.94761 | KIAA1691 protein | 2.56 | 167 |
| 423118 | AL035460 | Hs.124009 | Human DNA sequence from clone RP5-860F19 | 2.56 | 1719 5169 |
| 435406 | F26698 | Hs.4884 | calcium/calmodulin-dependent protein kin | 2.56 | 2911 |
| 442660 | AW138174 | Hs.130651 | ESTs | 2.55 | 3458 |
| 403649 | | | Target Exon | 2.55 | |
| 450493 | W93718 | Hs.166373 | nitric oxide synthase 3 (endothelial cel | 2.55 | 4140 5731 |
| 424463 | AW195353 | Hs.119903 | ESTs | 2.54 | 1850 |
| 432201 | AI538613 | Hs.298241 | Transmembrane protease, serine 3 | 2.54 | 2643 |
| 401915 | | | Target Exon | 2.54 | |
| 439796 | AI566839 | Hs.124483 | ESTs | 2.54 | 3236 |
| 433091 | Y12642 | Hs.3185 | lymphocyte antigen 6 complex, locus D | 2.54 | 2735 5527 |
| 448555 | AI536697 | Hs.159863 | ESTs | 2.54 | 3984 |
| 429712 | AW245825 | Hs.211914 | ENSP00000233627*:NADH-ubiquinone oxidore | 2.54 | 2410 |
| 455145 | AW858396 | Hs.208680 | ESTs | 2.54 | 4501 |
| 431463 | X95632 | Hs.343575 | abl-interactor 12 (SH3-containing protei | 2.53 | 2558 5477 |
| 440545 | AW183201 | Hs.190559 | ESTs | 2.53 | 3297 |
| 413865 | AA132816 | Hs.151714 | Homo sapiens mRNA for KIAA1769 protein, | 2.53 | 759 |
| 406312 | | | Target Exon | 2.53 | |
| 428366 | AI803651 | Hs.191608 | ESTs | 2.52 | 2245 |
| 417823 | R88869 | Hs.102447 | TSC-22-like | 2.52 | 1127 |
| 429211 | AF052693 | Hs.198249 | gap junction protein, beta 5 (connexin 3 | 2.52 | 2338 5394 |
| 413140 | T06607 | Hs.6846 | hypothetical protein FLJ13055 | 2.52 | 694 |
| 424342 | AF131778 | Hs.145432 | similar to PSD-95/SAP90-associated prote | 2.52 | 1833 5209 |
| 447823 | AI432628 | Hs.80887 | v-yes-1 Yamaguchi sarcoma viral related | 2.52 | 3910 |
| 404807 | | | Target Exon | 2.51 | |
| 417998 | AW967420 | | gb:EST379495 MAGE resequences, MAGJ Homo | 2.51 | 1144 |
| 426600 | NM_003378 | Hs.171014 | VGF nerve growth factor inducible | 2.51 | 2081 5312 |
| 420259 | AF004884 | Hs.96253 | calcium channel, voltage-dependent, P/Q | 2.51 | 1402 5072 |
| 402201 | | | C19000288*:gi\|7209634\|dbj\|BAA92285.1\| (A | 2.51 | |
| 451698 | Y16187 | Hs.26880 | endothelin converting enzyme-like 1 | 2.50 | 4241 5748 |
| 447786 | BE620810 | Hs.39619 | hypothetical protein LOC57333 | 2.50 | 3907 |
| 459081 | W07808 | Hs.141662 | ESTs, Weakly similar to ALU1_HUMAN ALU S | 2.50 | 4656 |
| 423063 | BE159877 | Hs.120824 | hypothetical protein FLJ21845 | 2.50 | 1714 |

Pkey: Unique Eos probeset identifier number
ExAccn: Exemplar Accession number, Genbank accession number
UniGeneID: UniGene number
UniGene Title: UniGene gene title
R1: 90th percentile of lung metastases to the brain Als divided by the 90th percentile of lung adenocarcinoma Als, where the 15th percentile of all normal body tissue Als was subtracted from the numerator and denominator.
SEQ ID NO(s): SEQ ID number(s) for nucleic acid and protein sequences associated with table entry.

[0359] TABLE 8B

| Pkey | CAT number | Accession |
|---|---|---|
| 435504 | 45952_3 | W26415 BI041755 BI040636 AA683081 BF954853 BF964120 BF848451 |
| | | BE143889 BF827761 AW899337 AW899594 BF947312 |
| 448677 | 634318_1 | AI560769 AI857497 AW151454 |
| 410028 | 958086_1 | AW576454 AW576456 AW576435 |
| 407450 | 7399_1 | BC022984 BC007740 AF385587 NM_000738 AL536991 AL537084 |
| | | AI500293 AI685922 AI821510 AI791651 AW451282 AJ006520 BI757352 |
| | | BI913662 BI197683 BI755888 BI913560 BF315022 H19732 AL566641 |
| | | AL566592 AI202576 AA531511 BF313917 BI198135 BG820557 |
| 419555 | 252042_1 | AA244401 AA244416 |
| 450875 | 10801_1 | AL041364 BE393266 AA573189 BF589066 AI623423 AI889612 H54292 |
| | | AA085863 AA669816 BE542832 BI094274 AI360690 T61853 AW081194 |
| | | AI541147 AW750358 |
| 435763 | 135600_1 | AA699940 AI243929 AA777255 |
| 400307 | 27110_2 | AF005081 BG193848 |
| 410939 | 1064852_2 | AW811332 AW811335 AW811328 AW811329 AW811339 |
| 409702 | 38388_1 | AK056951 AK026458 BI439120 BM021106 F30243 BM055214 BM054962 |
| | | BM069667 F37401 AA563621 AI752243 AI720773 AI933014 F18964 F35317 |
| | | F35258 F27772 H39537 AW445222 F19408 H28557 F30608 F31797 F30960 |
| | | BF837737 BF837688 AL551046 BI758668 BI765038 BI837440 BE392882 |
| | | BI438801 AI093511 AI752244 AI784111 BG490221 BF338840 BF338974 BG896472 |
| | | AL576843 AW966769 F25388 F37436 H28558 AI025548 AA782333 F30929 F36002 |
| | | F21229 AI720539 AA719449 F21231 F18924 AA626886 F30774 F27704 F31411 |
| | | F31127 F33381 F36153 F31793 F31138 F31966 F33901 AA298244 BI757347 |
| | | AI810201 AI692843 F29441 H51409 F21804 AW973249 F18440 F17572 F32499 |
| | | AA327152 AA534140 AI188088 F18893 F23362 AA010888 F18143 Z28500 H27651 |
| | | AI720790 F22425 H13178 H28677 F21098 F37777 F21466 F16598 F23420 |
| | | AL574723 R75610 F34035 F17845 F18560 F25902 R79117 F35534 F15713 |
| | | AI612800 F16563 F15645 F33609 F29995 BG939623 F17385 F17384 F18660 |
| | | F17922 F15523 AI093253 F18359 F31452 F00232 AI583430 BM021353 AA284108 |
| | | H27650 H29935 BE708208 AA010737 H51451 Z19399 AI678418 AI952535 F17265 |
| | | F17826 F37939 F35639 F17367 W75962 R70189 Z28755 R72106 AA335915 R75700 |
| | | R79116 W72887 AI581552 R71403 F23388 C03913 BI756149 BI116109 BF790727 |
| | | AL553994 R82966 W47487 AA456066 AW984608 BE708220 BG490537 W47419 |
| 455973 | 1561647_1 | BF352282 BE175424 BE175418 BE175383 |
| 454188 | 645555_1 | R81094 AW177908 AW177809 |
| 413166 | 1492542_1 | BE068443 BE068507 BE068731 BE068509 BE068511 BE068728 BE068636 |
| | | BE068633 BE068695 BE068730 BE068322 BE068510 BE068581 BE068518 |
| | | BE068779 BE068397 BE068515 BE068333 |
| 455984 | 1563239_1 | BE177445 BE177448 BE177440 BE177433 BE177439 BE177444 BE177442 |
| 454453 | 8582_4 | BF313069 BE879305 AW752781 AW752727 AW752559 AW752578 AW752584 |
| | | BF646118 AL545903 BF846115 AL525361 |
| 431912 | 610_10 | BI763666 BI517886 BI759051 AI688604 AI660552 BF588523 AW004785 AW295479 |
| | | BF591117 BF002672 BF064073 AA594441 AI380340 AI700219 AI659950 |
| | | AI688540 AW296326 |
| 410022 | 2576815_1 | AA824267 AA079728 AA079727 |
| 444828 | 2816194_1 | AI919288 AI824969 AI824982 AI198680 |
| 451619 | 58817_2 | AB067501 BE168197 AA477760 BF365805 AI658698 AI420374 AW006448 |
| | | BE168079 BE179882 BF352503 AW850126 AI902617 AI344041 AI805642 BG914033 |
| | | BE710337 F01902 H08649 BE180351 BE047272 R46826 AA897207 BE180115 |
| 453629 | 29513_2 | BG772130 BF928490 BI559843 BF755758 BF905496 BG718616 BG899602 |
| | | BG772217 BG719694 BI767332 AL046349 BI005797 BE179903 |
| 428342 | 6712_1 | AK056315 AI015524 AA724079 BI713619 AI377728 AW293682 AI928140 AI092404 |
| | | AI085630 AA731340 BM469629 AW968804 AA425658 AA769094 BF446026 AW118719 |
| | | AI332765 AW500888 AW576556 AI859571 AW499664 AW614573 AW629495 AW505314 |
| | | W74704 AI356361 AI923640 AW070509 AI521500 AL042095 AA609309 AA761319 AI381489 |
| | | H45700 AA761333 AW265424 AA909524 AA635311 AA649040 AI392620 Z40708 AI985564 |
| | | AW263513 AA913892 AI693486 AW263502 AI806164 AW291137 BI061872 BI059498 AA134476 |
| | | AW084888 AA036967 AW370823 T55263 BI002756 AA489664 BF827261 W74741 BF963166 |
| 409836 | 2510498_1 | AA077964 AA768182 AA077813 |
| 429545 | 934_5 | BG678726 BG708995 AI823645 AI669787 AI676005 AA456229 BF475367 BM021242 |
| | | AW129612 BF109992 AI298273 AI823860 AI804012 AI824164 AA773987 W96164 BM021522 |
| | | AI825903 AI824295 AA454622 BE833075 AW883986 BE833189 AI264049 AI090237 AI306153 |
| | | BF941075 BF369872 AW884073 |
| 425547 | 1228233_1 | AW963016 AA359181 AA359849 |
| 442257 | 18892_1 | AK055924 BC014104 BE889267 BI546677 BI549386 AL596984 AW503317 AW503831 |
| | | BE410616 BI600938 BI560459 BG980827 |
| 447128 | 11028_3 | BG292064 AI452509 AI271898 BE048502 BI966153 X84721 AI858001 BM021943 |
| | | AI553937 AI765259 F25787 AW015380 AA554539 AW059537 F35749 AA149853 AA961610 |
| | | AI568815 AW973696 C00201 R77127 BG438065 AI244810 H00719 |
| 407394 | 27110_2 | AF005081 BG193848 |
| 414213 | 5112_13 | BF311061 BG828926 BE262061 BI199425 T83915 AL554295 BG830004 BI335097 |
| | | BI193093 BF823498 BF823472 BM193195 AI952524 BF768990 BE781389 BI193044 BE297765 |
| 412595 | 35761_2 | AW964908 AA113749 BF907463 AA325520 BF911645 BF923879 BF928243 |
| 446924 | 626737_1 | AI694696 BE328826 BE504314 AI457297 AW134643 AI348387 |
| 441087 | 2642272_1 | AI797588 AI357156 AI204430 AA916498 |
| 409870 | 917085_1 | AW502321 AW502965 AW502314 AW502455 AW502282 AW502800 |
| 438870 | 52141_1 | AF075011 R63414 R63365 |
| 439285 | 22495_1 | AF086101 AL133916 AW955684 AW950828 AI346341 AI867454 BM263376 BF432231 |
| | | AI421279 AI655270 AW014882 BF439949 AA775552 N62351 AA626243 N59253 AI341407 |
| | | AA456968 AA457077 AI358918 AA364013 N79113 N54784 BE175639 N76721 AV727392 |
| | | Z45529 Z44343 F05908 F05403 F05398 |
| 417998 | 250632_1 | AW967420 AA210915 AA236991 AA210916 |

Pkey: Unique Eos probeset identifier number
CAT number: Gene cluster number
Accession: Genbank accession numbers

[0360] TABLE 8C

| Pkey | Ref | Strand | Nt_position |
|---|---|---|---|
| 405499 | 5762548 | Plus | 124845-125055, 131730-131833 |
| 406536 | 7711478 | Plus | 25655-25782 |
| 404608 | 9588566 | Minus | 22507-22637, 28093-28397 |
| 404502 | 7229863 | Minus | 56277-56819 |
| 403233 | 7637801 | Plus | 171338-171464, 172980-173099 |
| 402000 | 3935221 | Plus | 3935-4083, 7733-7845, 14982-15082 |
| 404672 | 9797204 | Minus | 24463-24607, 24711-24852, |
| | | | 25429-25565 |
| 406121 | 9143818 | Plus | 322375-323091 |
| 402356 | 8886972 | Minus | 90528-91265 |
| 406273 | 7543785 | Plus | 28641-29291 |
| 404033 | 8122195 | Plus | 7976-8156 |

Pkey: Unique number corresponding to an Eos probeset
Ref: Sequence source. The 7 digit numbers in this column are Genbank Identifier (Gl) numbers. “Dunham l. et al.” refers to the publication entitled “The DNA sequence of human chromosome 22.” Dunham l. et al., Nature (1999) 402: 489-495.
Strand: Indicates DNA strand from which exons were predicted.
Nt_position: Indicates nucleotide positions of predicted exons.

[0361] TABLE 9A
About 252 genes downregulated in lung metastases to the brain relative to primary lung tumors

| Pkey | ExAccn | UniGeneID | UniGene Title | R1 | SEQ ID NO(s): |
|---|---|---|---|---|---|
| 417204 | N81037 | Hs.1074 | surfactant, pulmonary-associated protein | 39.27 | 1071 |
| 418026 | BE379727 | Hs.83213 | fatty acid binding protein 4, adipocyte | 20.94 | 1148 |
| 424206 | NM_003734 | Hs.198241 | amine oxidase, copper containing 3 (vasc | 18.97 | 1815 5203 |
| 410677 | NM_003278 | Hs.65424 | tetranectin (plasminogen-binding protein | 7.71 | 4852 504 |
| 435684 | NM_001290 | Hs.4980 | LIM domain binding 2 | 11.20 | 2937 5568 |
| 415162 | AF035718 | Hs.78061 | transcription factor 21 | 6.62 | 4941 912 |
| 409385 | AA071267 | | gb:zm61g01.r1 Stratagene fibroblast (937 | 8.15 | 365 |
| 407694 | U77594 | Hs.37682 | retinoic acid receptor responder (tazaro | 11.84 | 181 4779 |
| 441835 | AB036432 | Hs.184 | advanced glycosylation end product-speci | 8.39 | 3375 5618 |
| 453655 | AW960427 | Hs.342874 | transforming growth factor, beta recepto | 4.25 | 4421 |
| 415274 | AF001548 | Hs.78344 | myosin, heavy polypeptide 11, smooth mus | 17.32 | 4944 921 |
| 412047 | AA934589 | Hs.49696 | ESTs | 6.27 | 605 |
| 423778 | Y09267 | Hs.132821 | flavin containing monooxygenase 2 | 7.36 | 1774 5187 |
| 407744 | AB020629 | Hs.38095 | ATP-binding cassette, sub-family A (ABC1 | 9.87 | 187 4781 |
| 429350 | AI754634 | Hs.131987 | ESTs | 5.41 | 2358 |
| 410016 | AA297977 | Hs.57907 | small inducible cytokine subfamily A (Cy | 10.30 | 429 |
| 407245 | X90568 | Hs.172004 | titin | 4.33 | 144 4768 |
| 426752 | X69490 | Hs.172004 | titin | 4.15 | 2093 5318 |
| 431723 | AW058350 | Hs.16762 | Homo sapiens mRNA; cDNA DKFZp564B2062 (f | 5.76 | 2590 |
| 428043 | T92248 | Hs.2240 | uteroglobin | 7.03 | 2216 |
| 435146 | R44557 | Hs.23748 | ESTs | 4.96 | 2899 |
| 416950 | AL049798 | Hs.80552 | dermatopontin | 11.09 | 1042 4972 |
| 441281 | BE501247 | Hs.144084 | ESTs | 6.42 | 3342 |
| 404246 | | | Target Exon | 6.16 | |
| 430998 | AF128847 | Hs.204038 | indolethylamine N-methyltransferase | 4.85 | 2524 5467 |
| 417355 | D13168 | Hs.82002 | endothelin receptor type B | 4.24 | 1085 4981 |
| 438150 | AA037534 | Hs.342874 | transforming growth factor, beta recepto | 4.17 | 3122 |
| 453676 | AW853745 | Hs.286035 | hypothetical protein FLJ22686 | 7.61 | 4423 |
| 422550 | BE297626 | Hs.296049 | microfibrillar-associated protein 4 | 5.37 | 1655 |
| 422667 | H25642 | | ESTs | 6.40 | 1670 |
| 423007 | AA320134 | Hs.196029 | Homo sapiens mRNA for KIAA1657 protein, | 4.69 | 1709 |
| 420225 | AW243046 | Hs.282076 | Homo sapiens mRNA for KIAA1650 protein, | 4.60 | 1397 |
| 424027 | AW337575 | Hs.201591 | ESTs | 4.34 | 1792 |
| 453180 | N46243 | Hs.110373 | ESTs, Highly similar to T42626 secreted | 5.15 | 4383 |
| 443062 | N77999 | Hs.8963 | Homo sapiens mRNA full length insert cDN | 4.61 | 3493 |
| 459247 | N46243 | Hs.110373 | ESTs, Highly similar to T42626 secreted | 4.55 | 4662 |
| 451154 | AA015879 | Hs.33536 | ESTs | 4.86 | 4198 |
| 438873 | AI302471 | Hs.124292 | Homo sapiens cDNA: FLJ23123 fis, clone L | 9.90 | 3173 |
| 456898 | NM_001928 | Hs.155597 | D component of complement (adipsin) | 3.65 | 4566 5803 |
| 418058 | AW161552 | Hs.83381 | guanine nucleotide binding protein 11 | 3.47 | 1154 |
| 410066 | AL117664 | Hs.58419 | DKFZP586L2024 protein | 4.26 | 438 4836 |
| 429640 | U83508 | Hs.2463 | angiopoietin 1 | 5.36 | 2400 5419 |
| 430468 | NM_004673 | Hs.241519 | angiopoietin-like 1 | 3.39 | 2489 5452 |
| 410023 | AB017169 | Hs.57929 | slit (Drosophila) homolog 3 | 3.84 | 431 4835 |
| 420105 | AW015571 | Hs.32244 | ESTs, Weakly similar to FMOD_HUMAN FIBRO | 6.62 | 1385 |
| 410545 | U32324 | Hs.64310 | interleukin 11 receptor, alpha | 4.99 | 4850 490 |
| 412002 | AA913024 | Hs.84698 | Homo sapiens cDNA FLJ14300 fis, clone PL | 4.47 | 601 |
| 444561 | NM_004469 | Hs.11392 | c-fos induced growth factor (vascular en | 3.51 | 3606 5641 |
| 425764 | AW996009 | Hs.112572 | Homo sapiens cDNA FLJ14130 fis, clone MA | 4.37 | 1994 |
| 408741 | M73720 | Hs.646 | carboxypeptidase A3 (mast cell) | 5.32 | 300 4805 |
| 418947 | W52990 | Hs.22860 | ESTs | 5.73 | 1261 |
| 419111 | AA234172 | Hs.137418 | ESTs | 6.96 | 1277 |
| 447371 | AA334274 | Hs.18368 | DKFZP564B0769 protein | 7.78 | 3851 |
| 416030 | H15261 | Hs.21948 | ESTs | 3.98 | 967 |
| 423690 | AA329648 | Hs.23804 | ESTs, Weakly similar to PN0099 son3 prot | 3.32 | 1767 |
| 412810 | M21574 | Hs.74615 | platelet-derived growth factor receptor, | 5.49 | 4888 672 |
| 413474 | T86312 | Hs.334485 | Homo sapiens cDNA FLJ14438 fis, clone HE | 7.27 | 725 |
| 439335 | AA742697 | Hs.62492 | NM_052863:Homo sapiens secretoglobin, fa | 5.16 | 3199 |
| 425498 | AL096725 | Hs.289010 | DKFZP434B103 protein | 5.76 | 1971 5267 |
| 445516 | R50291 | Hs.10846 | ESTs, Weakly similar to JH0783 diamine N | 8.70 | 3680 |
| 420626 | AF043722 | Hs.99491 | RAS guanyl releasing protein 2 (calcium | 4.39 | 1439 5083 |
| 416585 | X54162 | Hs.79386 | leiomodin 1, smooth muscle (LMOD1) (Thy | 3.40 | 1004 4964 |
| 427164 | AB037721 | Hs.173871 | KIAA1300 protein | 4.82 | 2129 5332 |
| 426488 | X03350 | Hs.4 | alcohol dehydrogenase 1B (class I), beta | 3.70 | 2071 5307 |
| 414290 | AI568801 | Hs.71721 | ESTs | 4.41 | 808 |
| 417967 | BE244373 | Hs.1119 | nuclear receptor subfamily 4, group A, m | 4.16 | 1142 |
| 451245 | AA016218 | Hs.58231 | ESTs | 4.45 | 4203 |
| 418807 | NM_004944 | Hs.88646 | deoxyribonuclease I-like 3 | 4.27 | 1242 5030 |
| 406923 | S70622 | | gb:G1 phase-specific gene {3′ region} [h | 3.49 | 110 4756 |
| 420556 | AA278300 | Hs.124292 | Homo sapiens cDNA: FLJ23123 fis, clone L | 8.19 | 1432 |
| 441499 | AW298235 | Hs.101689 | ESTs | 5.57 | 3354 |
| 443577 | AI078033 | Hs.177170 | ESTs, Weakly similar to ALU8_HUMAN ALU S | 4.94 | 3530 |
| 420174 | AI824144 | Hs.199749 | ESTs | 5.14 | 1391 |
| 454072 | AW572954 | Hs.252851 | ESTs | 3.49 | 4468 |
| 422195 | AB007903 | Hs.113082 | KIAA0443 gene product | 4.67 | 1614 5141 |
| 411988 | AA455459 | Hs.164480 | ESTs, Weakly similar to T50609 hypotheti | 5.45 | 599 |
| 414577 | AI056548 | Hs.72116 | hypothetical protein FLJ20992 similar to | 3.63 | 847 |
| 441723 | R72137 | Hs.7949 | DKFZP586B2420 protein | 4.64 | 3370 |
| 425887 | AL049443 | Hs.161283 | Homo sapiens mRNA; cDNA DKFZp586N2020 (f | 4.07 | 2010 |
| 447081 | Y13896 | Hs.17287 | potassium inwardly-rectifying channel, s | 3.81 | 3819 |
| 453355 | AW295374 | Hs.31412 | myopodin | 3.37 | 4400 |
| 458504 | AW070634 | Hs.144794 | ESTs | 4.36 | 4626 |
| 435823 | R07856 | Hs.16355 | ESTs | 3.28 | 2948 |
| 415386 | Z43087 | | gb:HSC13A121 normalized infant brain cDN | 3.32 | 929 |
| 448274 | AI268097 | Hs.67317 | Homo sapiens cDNA FLJ11775 fis, clone HE | 3.80 | 3954 |
| 425622 | AW360847 | Hs.16578 | ESTs | 3.66 | 1980 |
| 418965 | AI002238 | Hs.11482 | splicing factor, arginine/serine-rich 11 | 5.56 | 1264 |
| 450696 | AI654223 | Hs.16026 | hypothetical protein FLJ23191 | 3.86 | 4150 |
| 447742 | AF113925 | Hs.19405 | caspase recruitment domain 4 | 4.40 | 3899 5699 |
| 413802 | AW964490 | Hs.32241 | ESTs, Weakly similar to S65657 alpha-1C- | 3.61 | 754 |
| 431971 | BE274907 | Hs.77385 | myosin, light polypeptide 6, alkali, smo | 4.19 | 2622 |
| 455653 | BE154075 | | gb:PM0-HT0339-200400-010-E05 HT0339 Homo | 5.29 | 4518 |
| 406760 | AA829363 | | gb:of08g04.s1 NCI_CGAP_Co12 Homo sapiens | 3.56 | 98 |
| 443932 | AW888222 | Hs.9973 | tensin | 3.68 | 3563 |
| 421341 | AJ243212 | | deleted in malignant brain tumors 1 | 4.75 | 1509 5102 |
| 432485 | N90866 | Hs.276770 | CDW52 antigen (CAMPATH-1 antigen) | 3.75 | 2672 |
| 411962 | AA099050 | | gb:zk85d12.r1 Soares_pregnant_uterus_NbH | 4.43 | 594 |
| 453874 | AW591783 | Hs.36131 | collagen, type XIV, alpha 1 (undulin) | 5.05 | 4440 |
| 444769 | AI191650 | Hs.221436 | ESTs | 3.34 | 3626 |
| 451735 | AW407892 | | ESTs | 3.81 | 4244 |
| 446804 | AW572304 | Hs.271260 | ESTs, Moderately similar to dJ63G5.3 (H. | 3.39 | 3789 |
| 448515 | H68441 | Hs.13528 | hypothetical protein FLJ14054 | 3.47 | 3979 |
| 452816 | AA131789 | Hs.61509 | ESTs | 3.70 | 4346 |
| 439484 | AW970218 | Hs.135254 | Homo sapiens clone 1 thrombospondin mRNA | 4.04 | 3211 |
| 433688 | AA628467 | Hs.112572 | Homo sapiens cDNA FLJ14130 fis, clone MA | 4.03 | 2780 |
| 424580 | AA446539 | Hs.339024 | ESTs, Weakly similar to A46010 X-linked | 3.44 | 1860 |
| 447578 | AA912347 | Hs.136585 | ESTs, Weakly similar to JC5314 CDC28/cdc | 5.64 | 3882 |
| 447896 | AI436124 | Hs.294069 | Homo sapiens cDNA FLJ13384 fis, clone PL | 5.72 | 3920 |
| 417696 | BE241624 | Hs.82401 | CD69 antigen (p60, early T-cell activati | 4.90 | 1113 |
| 443679 | AK001810 | Hs.9670 | hypothetical protein FLJ10948 | 10.31 | 3538 5630 |
| 414516 | AI307802 | | ESTs, Weakly similar to T43458 hypotheti | 3.44 | 838 |
| 435916 | AW001885 | Hs.114103 | ESTs | 6.26 | 2952 |
| 452664 | AA398859 | Hs.18397 | hypothetical protein FLJ23221 | 4.22 | 4331 |
| 427890 | AA435761 | | ESTs | 6.61 | 2203 |
| 434666 | AF151103 | Hs.112259 | T cell receptor gamma locus | 3.69 | 2859 5551 |
| 450400 | AI694722 | Hs.279744 | ESTs | 3.33 | 4137 |
| 406800 | AA505535 | | gb:nh84h10.s1 NCI_CGAP_Br1.1 Homo sapien | 4.85 | 100 |
| 429655 | U48959 | Hs.211582 | myosin, light polypeptide kinase | 3.32 | 2402 5420 |
| 425701 | AA361850 | Hs.240443 | Human clone 137308 mRNA, partial cds | 4.16 | 1990 |
| 453767 | AB011792 | Hs.35094 | extracellular matrix protein 2, female o | 3.50 | 4430 5782 |
| 452336 | AA960961 | Hs.305953 | zinc finger protein 83 (HPF1) | 5.80 | 4298 |
| 418117 | AI922013 | Hs.83496 | linker for activation of T cells | 3.91 | 1162 |
| 407753 | AL045916 | Hs.293419 | ESTs | 4.04 | 189 |
| 428780 | AI478578 | Hs.153714 | ESTs | 3.53 | 2296 |
| 429439 | AL049268 | Hs.202684 | Homo sapiens mRNA; cDNA DKFZp564G103 (fr | 3.85 | 2370 |
| 412000 | AW576555 | Hs.15780 | ATP-binding cassette, sub-family A (ABC1 | 3.47 | 600 |
| 448051 | BE615453 | Hs.346509 | dedicator of cyto-kinesis 1 | 3.56 | 3938 |
| 406801 | AW242054 | Hs.190813 | ribosomal protein L9 | 4.37 | 101 |
| 424698 | AA164366 | Hs.151973 | hypothetical protein FLJ23511 | 4.84 | 1875 |
| 442176 | AA983764 | Hs.128910 | ESTs | 4.17 | 3403 |
| 416427 | BE244050 | Hs.79307 | Rac/Cdc42 guanine exchange factor (GEF) | 4.54 | 997 |
| 413156 | AA127133 | | gb:zI87e03.r1 Stratagene colon (937204) | 3.65 | 696 |
| 424078 | AB006625 | Hs.139033 | paternally expressed 3 | 4.00 | 1800 5196 |
| 417410 | AF063020 | Hs.82110 | PC4 and SFRS1 interacting protein 1 | 4.01 | 1093 4984 |
| 434958 | T99949 | Hs.303428 | Homo sapiens cDNA FLJ14832 fis, clone OV | 3.58 | 2883 |
| 427544 | AI767152 | Hs.181400 | ESTs, Weakly similar to I78885 serine/th | 3.47 | 2163 |
| 453510 | AI699482 | Hs.42151 | ESTs | 4.15 | 4415 |
| 442287 | AW952703 | Hs.8182 | synaptic nuclei expressed gene 1b | 3.46 | 3411 |
| 414142 | AW368397 | Hs.334485 | hemicentin (fibulin 6) | 4.90 | 792 |
| 421512 | AB007923 | Hs.265848 | myomegalin | 3.41 | 1531 5112 |
| 437176 | AW176909 | Hs.42346 | calcineurin-binding protein calsarcin-1 | 5.31 | 3042 |
| 426992 | BE244961 | Hs.343200 | FE65-LIKE 2 | 4.74 | 2118 |
| 431615 | AW295859 | Hs.235860 | ESTs | 3.76 | 2576 |
| 458368 | BE504731 | Hs.138827 | ESTs | 3.77 | 4620 |
| 406282 | | | Homo sapiens mRNA full length insert cDN | 3.62 | |
| 411546 | BE172648 | Hs.75415 | beta-2-microglobulin | 4.35 | 559 |
| 421956 | AA301180 | | gb:EST14093 Testis tumor Homo sapiens cD | 5.12 | 1585 |
| 422964 | AW439476 | Hs.256895 | ESTs | 4.15 | 1702 |
| 410544 | AI446543 | Hs.95511 | ESTs | 3.33 | 489 |
| 459508 | R83265 | Hs.205956 | EST | 3.39 | 4670 |
| 409038 | T97490 | Hs.50002 | small inducible cytokine subfamily A (Cy | 4.81 | 326 |
| 421823 | N40850 | Hs.28625 | ESTs | 6.96 | 1568 |
| 407568 | AA740964 | Hs.62699 | ESTs | 3.32 | 168 |
| 430810 | AI742514 | Hs.158732 | ESTs | 3.34 | 2515 |
| 423705 | F11425 | | ribosomal protein S3 | 5.50 | 1769 |
| 436553 | AW407157 | Hs.8997 | immunoglobulin lambda locus | 4.97 | 2992 |
| 403325 | | | C2000428*:gi\|7705383\|ref\|NP_057536.1\| GC | 4.59 | |
| 437255 | R58970 | Hs.9887 | ESTs | 3.58 | 3049 |
| 439665 | W93979 | | gb:zd97h10.r1 Soares_fetal_heart_NbHH19W | 3.54 | 3226 |
| 450000 | AI952797 | Hs.10888 | hypothetical protein FLJ21709 | 3.39 | 4096 |
| 449787 | AA005341 | | ESTs | 3.69 | 4082 |
| 429760 | AW137682 | Hs.134589 | ESTs | 3.39 | 2414 |
| 442070 | BE244622 | Hs.8084 | hypothetical protein dJ465N24.2.1 | 3.71 | 3394 |
| 415733 | AI052628 | Hs.271570 | ESTs, Weakly similar to 2109260A B cell | 3.35 | 947 |
| 424084 | AI940675 | Hs.20914 | hypothetical protein FLJ23056 | 3.51 | 1802 |
| 427732 | NM_002980 | Hs.2199 | secretin receptor | 3.66 | 2191 5345 |
| 431177 | NM_003304 | Hs.250687 | transient receptor potential channel 1 | 3.67 | 2536 5471 |
| 447571 | AF274863 | Hs.18889 | DKFZP434M183 protein | 3.55 | 3880 5693 |
| 458018 | AI199575 | Hs.37716 | ESTs | 4.63 | 4606 |
| 453880 | AI803166 | Hs.135121 | ESTs, Weakly similar to I38022 hypotheti | 4.21 | 4443 |
| 425456 | T70445 | Hs.157850 | ribosomal protein L9 | 5.19 | 1967 |
| 442587 | AK001846 | Hs.8412 | Homo sapiens cDNA FLJ10984 fis, clone PL | 3.53 | 3449 |
| 443998 | AI620661 | Hs.296276 | ESTs | 4.77 | 3567 |
| 435289 | AA677540 | Hs.117064 | ESTs | 3.50 | 2907 |
| 445837 | AI261700 | Hs.145544 | ESTs | 4.98 | 3702 |
| 442561 | NM_013450 | Hs.8383 | bromodomain adjacent to zinc finger doma | 6.60 | 3442 5621 |
| 433205 | AB040901 | Hs.23542 | KIAA1468 protein | 3.40 | 2748 5533 |
| 422241 | Y00062 | Hs.170121 | protein tyrosine phosphatase, receptor t | 3.32 | 1617 5142 |
| 437365 | AW965771 | Hs.91065 | hypothetical protein DKFZp761B2423 | 3.94 | 3061 |
| 419902 | AA804409 | Hs.118920 | ESTs | 3.47 | 1367 |
| 445618 | H79667 | Hs.237642 | Homo sapiens cDNA FLJ12052 fis, clone HE | 3.86 | 3688 |
| 433019 | AI208513 | Hs.279915 | translocase of inner mitochondrial membr | 4.10 | 2723 |
| 425231 | AA527161 | | ESTs | 3.56 | 1939 |
| 428046 | AW812795 | Hs.337534 | ESTs, Moderately similar to I38022 hypot | 5.99 | 2217 |
| 409667 | AW452447 | Hs.283107 | ESTs, Weakly similar to T22143 hypotheti | 3.32 | 392 |
| 414474 | AA147968 | Hs.31297 | duodenal cytochrome b | 3.65 | 834 |
| 422128 | AW881145 | | gb:QV0-OT0033-010400-182-a07 OT0033 Homo | 6.35 | 1607 |
| 447754 | AW073310 | Hs.163533 | intron of HER4 | 3.47 | 3900 |
| 422276 | AL137690 | Hs.114173 | Homo sapiens mRNA; cDNA DKFZp434O032 (fr | 3.48 | 1625 5145 |
| 451678 | AA374181 | Hs.26799 | DKFZP564D0764 protein | 4.51 | 4238 |
| 451744 | AI813757 | | F-box only protein 29 | 3.58 | 4246 |
| 449609 | BE246434 | Hs.289026 | guanine nucleotide binding protein (G pr | 3.46 | 4070 |
| 426276 | AW881411 | Hs.169078 | hypothetical protein FLJ23018 | 3.51 | 2047 |
| 440602 | AI743491 | Hs.292692 | ESTs | 3.44 | 3303 |
| 433253 | AW450502 | Hs.24218 | ESTs | 3.37 | 2750 |
| 406757 | T65957 | Hs.77039 | ATP synthase, H transporting, mitochondr | 3.73 | 97 |
| 417032 | AA192469 | Hs.271838 | ESTs | 3.56 | 1054 |
| 438086 | AA336519 | Hs.83623 | nuclear receptor subfamily 1, group I, m | 3.30 | 3116 |
| 436987 | AA740990 | Hs.120551 | toll-like receptor 10 | 4.31 | 3025 |
| 407374 | AA724738 | Hs.131034 | ESTs, Weakly similar to I78885 serine/th | 5.21 | 157 |
| 412088 | AI689496 | Hs.108932 | ESTs | 4.12 | 606 |
| 447022 | AW291223 | Hs.157573 | ESTs | 4.48 | 3812 |
| 450654 | AJ245587 | Hs.25275 | Kruppel-type zinc finger protein | 3.51 | 4144 5733 |
| 450701 | H39960 | Hs.288467 | hypothetical protein XP_098151 (leucine- | 5.43 | 4152 |
| 408491 | AI088063 | Hs.7882 | ESTs | 5.35 | 272 |
| 451323 | AI903313 | Hs.34579 | ESTs, Moderately similar to ALU6_HUMAN A | 3.30 | 4211 |
| 407183 | AA358015 | | gb:EST66864 Fetal lung III Homo sapiens | 3.50 | 134 |
| 436749 | AA584890 | Hs.5302 | lectin, galactoside-binding, soluble, 4 | 9.22 | 3006 |
| 439138 | AI742605 | Hs.193696 | ESTs | 3.33 | 3188 |
| 450219 | AI826999 | Hs.224624 | ESTs | 3.32 | 4114 |
| 456373 | BE247706 | Hs.89751 | membrane-spanning 4-domains, subfamily A | 4.20 | 4539 |
| 424677 | U09414 | | zinc finger protein 137 (clone pHZ-30) | 3.55 | 1871 5225 |
| 451240 | AJ131693 | Hs.58103 | A kinase (PRKA) anchor protein (yotiao) | 3.46 | 4202 5739 |
| 437205 | AL110232 | Hs.279243 | Homo sapiens mRNA; cDNA DKFZp564D2071 (f | 3.36 | 3044 |
| 421893 | NM_001078 | Hs.109225 | vascular cell adhesion molecule 1 | 3.93 | 1577 5127 |
| 429493 | AL134708 | Hs.145998 | ESTs | 3.98 | 2379 |
| 449539 | W80363 | Hs.58446 | ESTs | 3.55 | 4065 |
| 417339 | AI912592 | Hs.7882 | ESTs | 4.62 | 1082 |
| 448878 | AW204582 | Hs.224906 | ESTs | 3.35 | 4017 |
| 425247 | NM_005940 | Hs.155324 | matrix metalloproteinase 11 (stromelysin | 5.62 | 1943 5253 |
| 418310 | AA814100 | Hs.86693 | ESTs | 3.86 | 1180 |
| 403903 | | | C5001632*: gi\|10645308\|gb\|AAG21430.1\|AC00 | 4.23 | |
| 437644 | AA748575 | Hs.136748 | lectin-like NK cell receptor | 3.66 | 3077 |
| 450788 | AI738410 | | ESTs | 3.94 | 4165 |
| 453392 | U23752 | Hs.32964 | SRY (sex determining region Y)-box 11 | 4.87 | 4403 5776 |
| 407758 | D50915 | Hs.38365 | KIAA0125 gene product | 4.09 | 192 4782 |
| 419556 | U29615 | Hs.91093 | chitinase 1 (chitotriosidase) | 4.46 | 1332 5051 |
| 439854 | T62993 | Hs.347609 | gb:yb99a06.r1 Stratagene lung (937210) H | 3.30 | 3239 |
| 430770 | AA765694 | Hs.123296 | ESTs | 3.94 | 2512 |
| 420224 | M84371 | Hs.96023 | CD19 antigen | 4.13 | 1396 5068 |
| 419255 | AA235672 | Hs.87491 | ESTs | 3.89 | 1294 |
| 422583 | AA410506 | Hs.27973 | KIAA0874 protein | 3.69 | 1660 |
| 445669 | AI570830 | Hs.174870 | ESTs | 3.64 | 3693 |
| 447932 | AA837474 | Hs.20021 | vesicle-associated membrane protein 1 (s | 3.37 | 3922 |
| 411982 | H53601 | | gb:yq87g05.s1 Soares fetal liver spleen | 3.52 | 598 |
| 451583 | AI653797 | Hs.24133 | ESTs | 3.32 | 4230 |
| 443184 | AI638728 | Hs.131973 | ESTs | 3.73 | 3505 |
| 440650 | R44692 | Hs.326801 | Human DNA sequence from PAC 75N13 on chr | 4.06 | 3309 |
| 418007 | M13509 | Hs.83169 | matrix metalloproteinase 1 (interstitial | 6.85 | 1146 4998 |
| 452107 | AB020681 | Hs.27973 | KIAA0874 protein | 3.35 | 4271 5755 |
| 407811 | AW190902 | Hs.40098 | cysteine knot superfamily 1, BMP antagon | 3.68 | 199 |
| 455002 | AW850286 | | gb:IL3-CT0219-161199-031-H11 CT0219 Homo | 3.53 | 4499 |
| 408063 | BE086548 | Hs.42346 | calcineurin-binding protein calsarcin-1 | 3.88 | 230 |
| 417689 | AA828347 | Hs.90998 | KIAA0128 protein; septin 2 | 3.48 | 1111 |
| 421361 | AI246129 | | ESTs | 3.63 | 1512 |
| 458080 | BE142728 | | gb:MR0-HT0157-021299-004-d08 HT0157 Homo | 3.33 | 4608 |
| 422867 | L32137 | Hs.1584 | cartilage oligomeric matrix protein (pse | 4.41 | 1687 5160 |
| 414085 | AA114016 | Hs.75746 | aldehyde dehydrogenase 1 family, member | 3.39 | 786 |
| 456034 | AW450979 | | gb:UI-H-BI3-ala-a-12-0-UI.s1 NCI_CGAP_Su | 3.44 | 4527 |
| 427585 | D31152 | Hs.179729 | collagen, type X, alpha 1 (Schmid metaph | 4.10 | 2169 |
| 406964 | M21305 | | FGENES predicted novel secreted protein | 3.98 | 114 4760 |
| 411089 | AA456454 | | cell division cycle 2-like 1 (PITSLRE pr | 3.64 | 534 |

Pkey: Unique Eos probeset identifier number
ExAccn: Exemplar Accession number, Genbank accession number
UniGeneID: UniGene number
UniGene Title: UniGene gene title
R1: 90th percentile of lung adenocarcinoma Als divided by the 90th percentile of lung metastases to the brain Als, where the 15th percentile of all normal body tissue Als was subtracted from the numerator and denominator.
SEQ ID NO(s): SEQ ID number(s) for nucleic acid and protein sequences associated with table entry.

[0362] TABLE 9B

| Pkey | CAT number | Accession |
|---|---|---|
| 409385 | 110758_1 | T65940 T64515 AA071267 AA071334 |
| 422667 | 224778_1 | AI758223 AW469334 BF940841 AW080348 AI270363 |
| | | AI055892 BE464168 BF431797 BE350144 BF448739 AI693409 BF432999 D62848 |
| | | AA398070 AI383375 AW611490 |
| 415386 | 11281_5 | R95033 H15506 Z43087 F07410 H54108 H98000 |
| 455653 | 200977_1 | BF820280 BE154075 BE154018 BE153509 BE153973 BE064861 |
| | | BE065075 BE064684 BE153602 BE153852 BE153847 BE064772 BE064842 BE153557 |
| 406760 | 0_0 | AA829363 |
| 421341 | 1407_1 | NM_007329 AF159456 AJ243212 AJ297935 AA295769 |
| | | NM_017579 AJ243224 AI492875 AI796676 AI749838 AA918144 AI814590 |
| | | AI923531 BF513992 AI720725 AI150879 AI279072 AW612904 AI492104 AI284510 AI141231 |
| | | AA613554 AW662148 AW769047 AA565985 AW612888 AU100513 BG955585 |
| | | BG955588 AA295763 BE829414 BF760645 BG954398 AA295332 AA295795 |
| | | BE932867 AW769569 T89953 BE934311 |
| 411962 | 2307710_1 | AA099050 AA099526 T47733 |
| 451735 | 480028_1 | BG113814 AW407892 AI812096 AW076043 |
| 414516 | 60847_1 | AK057782 AI146454 BG703115 AI765980 AI948611 AA889263 AA947457 |
| | | BG547193 H11947 Z38147 F10426 BF447329 H11946 T74968 F06195 BG548563 |
| | | AI004988 AA148735 AI307802 AI439791 BE041453 AI984904 AA148734 F12823 |
| 427890 | 1373988_1 | AA417099 AA435761 AA972917 AI660387 |
| 406800 | 0_0 | AA505535 |
| 413156 | 1224380_1 | AW958912 AA384396 T72119 AA127133 |
| 421956 | 461103_1 | AV750327 AA300961 AA301180 AW963779 |
| 423705 | 2901_38 | BG875506 AI299893 AA989327 BE708123 AI859076 AI434010 AA347691 |
| | | F11425 AA329878 |
| 439665 | 24497_1 | AF086498 AW955697 W93979 AI936062 AW268568 AA364461 W93980 |
| | | BI914847 BI523483 |
| 449787 | 79759_1 | AW975633 AW961632 AA322539 AW513289 AI864190 AW073506 AI016894 |
| | | AA747635 AA730405 AA418033 AI609549 AI873981 AA005341 BE182658 |
| | | AA004291 |
| 425231 | 235504_1 | AA527161 BG211784 AA527065 AA505489 AW512550 |
| 422128 | 17516_16 | BI261864 BI036453 BI023096 BI023388 AA331991 AV721898 AW881145 |
| | | AA490718 M85637 T06067 AV761102 BI023091 BI022906 |
| 451744 | 18159_4 | BG165570 AI973190 BE221960 AI813757 |
| 424677 | 2518_37 | U09414 NM_003438 AA503545 AI022449 AA043458 AA766074 |
| | | AA765442 AA805052 AI028211 AW609708 |
| 450788 | 513262_1 | AI971725 AI738410 AW016905 |
| 411982 | 1144977_1 | AW880868 BE003925 H53601 |
| 455002 | 1089092_1 | BE143505 BF374194 BF374190 AW850286 |
| 421361 | 267843_1 | AA287780 AI246129 AI708426 Z36873 |
| 458080 | 1164245_1 | BI602455 AW937124 AA834047 BE142728 |
| 456034 | 685586_1 | AA136653 AA136656 AW450979 AA984358 AA809054 AW238038 |
| | | AA492073 BE168945 |
| 411089 | 5597_6 | BI009308 BI009893 BF922023 BF922909 BF922913 BF922096 BF957733 |
| | | BE701791 AA456454 AA579876 BF933710 AA091294 BI00291 AW905577 |
| | | AW975593 AA713730 AW836781 AA666384 AA551106 BF594606 AI082382 |
| | | AI955808 AI679895 AI679386 BF435555 AA586369 AA551351 AA595822 |
| | | AA565188 BF808855 AA584921 N86077 AA601031 AA633188 AA514764 AA454562 |
| | | AA551297 AA936109 BI009389 AW897806 BE815442 BF739374 BI009310 |
| | | BF925422 BF933709 BF922034 BF925465 BI009680 |

Pkey: Unique Eos probeset identifier number
CAT number: Gene cluster number
Accession: Genbank accession numbers

[0363] TABLE 9C

| Pkey | Ref | Strand | Nt_position |
|---|---|---|---|
| 404246 | 7406725 | Plus | 82477-82628, 82721-82817, |
| | | | 82910-83071, 8314 |
| 406282 | 7549620 | Plus | 61692-61955 |
| 403325 | 8440025 | Minus | 109763-109926 |
| 403903 | 7710671 | Minus | 101165-102597 |

Pkey: Unique number corresponding to an Eos probeset
Ref: Sequence source. The 7 digit numbers in this column are Genbank Identifier (GI) numbers. “Dunham I. et al.” refers to the publication entitled “The DNA sequence of human chromosome 22.” Dunham I. et al., Nature (1999) 402: 489-495.
Strand: Indicates DNA strand from which exons were predicted.
Nt_position: Indicates nucleotide positions of predicted exons.

[0364] TABLE 10A
About 289 genes downregulated in lung metastases to the brain relative to normal lung

| | |
|---|---|
| Pkey: | Unique Eos probeset identifier number |
| ExAccn: | Exemplar Accession number, Genbank accession number |
| UniGeneID: | UniGene number |
| UniGene Title: | UniGene gene title |
| R1: | 90th percentile of normal lung Als divided by the 90th percentile of lung metastases to the |
| | brain Als, where the 15th percentile of all normal body tissue Als was subtracted from the |
| | numerator and denominator. |
| SEQ ID NO(s): | SEQ ID number(s) for nucleic acid and protein sequences associated with table entry. |

| Pkey | ExAccn | UniGeneID | UniGene Title | R1 | SEQ ID NO(s): |
|---|---|---|---|---|---|
| 417204 | N81037 | Hs.1074 | surfactant, pulmonary-associated protein | 50.05 | 1071 |
| 418026 | BE379727 | Hs.83213 | fatty acid binding protein 4, adipocyte | 31.39 | 1148 |
| 424206 | NM_003734 | Hs.198241 | amine oxidase, copper containing 3 (vasc | 29.42 | 1815 5203 |
| 410677 | NM_003278 | Hs.65424 | tetranectin (plasminogen-binding protein | 24.89 | 4852 504 |
| 435684 | NM_001290 | Hs.4980 | LIM domain binding 2 | 18.00 | 2937 5568 |
| 415162 | AF035718 | Hs.78061 | transcription factor 21 | 15.10 | 4941 912 |
| 409385 | AA071267 | | gb: zm61g01.r1 Stratagene fibroblast (937 | 14.40 | 365 |
| 407694 | U77594 | Hs.37682 | retinoic acid receptor responder (tazaro | 14.18 | 181 4779 |
| 441835 | AB036432 | Hs.184 | advanced glycosylation end product-speci | 14.15 | 3375 5618 |
| 453655 | AW960427 | Hs.342874 | transforming growth factor, beta recepto | 13.42 | 4421 |
| 415274 | AF001548 | Hs.78344 | myosin, heavy polypeptide 11, smooth mus | 12.95 | 4944 921 |
| 412047 | AA934589 | Hs.49696 | ESTs | 11.68 | 605 |
| 423778 | Y09267 | Hs.132821 | flavin containing monooxygenase 2 | 10.61 | 1774 5187 |
| 407744 | AB020629 | Hs.38095 | ATP-binding cassette, sub-family A (ABC1 | 10.36 | 187 4781 |
| 427019 | AA001732 | Hs.173233 | hypothetical protein FLJ10970 | 9.80 | 2122 |
| 429350 | AI754634 | Hs.131987 | ESTs | 9.51 | 2358 |
| 410016 | AA297977 | Hs.57907 | small inducible cytokine subfamily A (Cy | 9.49 | 429 |
| 453310 | X70697 | Hs.553 | solute carrier family 6 (neurotransmitte | 9.47 | 4394 5774 |
| 407245 | X90568 | Hs.172004 | titin | 9.22 | 144 4768 |
| 426752 | X69490 | Hs.172004 | titin | 9.13 | 2093 5318 |
| 431723 | AW058350 | Hs.16762 | Homo sapiens mRNA; cDNA DKFZp564B2062 (f | 9.06 | 2590 |
| 428043 | T92248 | Hs.2240 | uteroglobin | 8.96 | 2216 |
| 435146 | R44557 | Hs.23748 | ESTs | 8.56 | 2899 |
| 416950 | AL049798 | Hs.80552 | dermatopontin | 8.53 | 1042 4972 |
| 441281 | BE501247 | Hs.144084 | ESTs | 8.52 | 3342 |
| 404246 | | | Target Exon | 8.39 | |
| 432128 | AA127221 | Hs.296502 | Interleukin 1 receptor-like 1 | 8.35 | 2633 |
| 430998 | AF128847 | Hs.204038 | indolethylamine N-methyltransferase | 8.20 | 2524 5467 |
| 417355 | D13168 | Hs.82002 | endothelin receptor type B | 8.18 | 1085 4981 |
| 422287 | F16365 | Hs.114346 | cytochrome c oxidase subunit VIIa polype | 8.16 | 1628 |
| 438150 | AA037534 | Hs.342874 | transforming growth factor, beta recepto | 8.09 | 3122 |
| 453676 | AW853745 | Hs.286035 | hypothetical protein FLJ22686 | 8.00 | 4423 |
| 422550 | BE297626 | Hs.296049 | microfibrillar-associated protein 4 | 7.73 | 1655 |
| 422667 | H25642 | | ESTs | 7.50 | 1670 |
| 423007 | AA320134 | Hs.196029 | Homo sapiens mRNA for KIAA1657 protein, | 7.36 | 1709 |
| 454229 | AW957744 | Hs.278469 | lacrimal proline rich protein | 7.15 | 4473 |
| 436394 | AA531187 | Hs.126705 | ESTs | 7.10 | 2982 |
| 453574 | AI767947 | Hs.50841 | ESTs | 7.07 | 4418 |
| 420225 | AW243046 | Hs.282076 | Homo sapiens mRNA for KIAA1650 protein, | 6.88 | 1397 |
| 443709 | AI082692 | Hs.134662 | ESTs | 6.79 | 3542 |
| 424027 | AW337575 | Hs.201591 | ESTs | 6.78 | 1792 |
| 428769 | AW207175 | Hs.106771 | ESTs | 6.69 | 2293 |
| 414464 | AI870175 | Hs.13957 | ESTs | 6.67 | 833 |
| 453180 | N46243 | Hs.110373 | ESTs, Highly similar to T42626 secreted | 6.51 | 4383 |
| 443062 | N77999 | Hs.8963 | Homo sapiens mRNA full length insert cDN | 6.48 | 3493 |
| 459247 | N46243 | Hs.110373 | ESTs, Highly similar to T42626 secreted | 6.29 | 4662 |
| 451154 | AA015879 | Hs.33536 | ESTs | 6.13 | 4198 |
| 438873 | AI302471 | Hs.124292 | Homo sapiens cDNA: FLJ23123 fis, clone L | 6.08 | 3173 |
| 411939 | AI365585 | Hs.146246 | ESTs | 5.97 | 587 |
| 456898 | NM_001928 | Hs.155597 | D component of complement (adipsin) | 5.97 | 4566 5803 |
| 418058 | AW161552 | Hs.83381 | guanine nucleotide binding protein 11 | 5.90 | 1154 |
| 410066 | AL117664 | Hs.58419 | DKFZP586L2024 protein | 5.64 | 438 4836 |
| 439745 | AL389981 | | Homo sapiens mRNA full length insert cDN | 5.60 | 3232 |
| 401974 | | | NM_018896*: Homo sapiens calcium channel, | 5.56 | 31 4701 |
| 429640 | U83508 | Hs.2463 | angiopoietin 1 | 5.55 | 2400 5419 |
| 421218 | NM_000499 | Hs.72912 | cytochrome P450, subfamily I (aromatic c | 5.51 | 1490 5098 |
| 430310 | U60115 | Hs.239069 | four and a half LIM domains 1 | 5.50 | 2468 5443 |
| 430468 | NM_004673 | Hs.241519 | angiopoietin-like 1 | 5.47 | 2489 5452 |
| 413948 | C05145 | Hs.75636 | myosin light chain 2a | 5.37 | 768 |
| 410023 | AB017169 | Hs.57929 | slit (Drosophila) homolog 3 | 5.20 | 431 4835 |
| 418935 | T28499 | Hs.89485 | carbonic anhydrase IV | 5.20 | 1259 |
| 446017 | N98238 | Hs.55185 | ESTs | 5.15 | 3718 |
| 420105 | AW015571 | Hs.32244 | ESTs, Weakly similar to FMOD_HUMAN FIBRO | 5.11 | 1385 |
| 420958 | AA309431 | Hs.66 | interleukin 1 receptor-like 1 | 5.10 | 1469 |
| 409153 | W03754 | Hs.50813 | hypothetical protein FLJ20022 | 5.07 | 342 |
| 410545 | U32324 | Hs.64310 | interleukin 11 receptor, alpha | 5.07 | 4850 490 |
| 412002 | AA913024 | Hs.84698 | Homo sapiens cDNA FLJ14300 fis, clone PL | 5.07 | 601 |
| 442832 | AW206560 | Hs.253569 | ESTs | 5.06 | 3474 |
| 444561 | NM_004469 | Hs.11392 | c-fos induced growth factor (vascular en | 5.06 | 3606 5641 |
| 431848 | AI378857 | Hs.271605 | ESTs, Highly similar to AF175283 1 zinc | 4.97 | 2606 |
| 425764 | AW996009 | Hs.112572 | Homo sapiens cDNA FLJ14130 fis, clone MA | 4.94 | 1994 |
| 427605 | NM_000997 | Hs.337445 | ribosomal protein L37 | 4.93 | 2171 5340 |
| 450008 | H52970 | Hs.36688 | WAP four-disulfide core domain 1 | 4.90 | 4097 |
| 421177 | AW070211 | Hs.102415 | Homo sapiens mRNA; cDNA DKFZp586N0121 (f | 4.86 | 1485 |
| 451607 | AI439103 | Hs.7945 | AIE-75 binding protein protein | 4.86 | 4232 |
| 408741 | M73720 | Hs.646 | carboxypeptidase A3 (mast cell) | 4.85 | 300 4805 |
| 418947 | W52990 | Hs.22860 | ESTs | 4.85 | 1261 |
| 419111 | AA234172 | Hs.137418 | ESTs | 4.82 | 1277 |
| 447371 | AA334274 | Hs.18368 | DKFZP564B0769 protein | 4.77 | 3851 |
| 416030 | H15261 | Hs.21948 | ESTs | 4.77 | 967 |
| 423690 | AA329648 | Hs.23804 | ESTs, Weakly similar to PN0099 son3 prot | 4.74 | 1767 |
| 439551 | W72062 | Hs.11112 | ESTs | 4.73 | 3214 |
| 412810 | M21574 | Hs.74615 | platelet-derived growth factor receptor, | 4.71 | 4888 672 |
| 424310 | AA338648 | Hs.50334 | testes development-related NYD-SP22 | 4.70 | 1828 |
| 413474 | T86312 | Hs.334485 | Homo sapiens cDNA FLJ14438 fis, clone HE | 4.66 | 725 |
| 423099 | NM_002837 | Hs.123641 | protein tyrosine phosphatase, receptor t | 4.63 | 1718 5168 |
| 439335 | AA742697 | Hs.62492 | NM_052863: Homo sapiens secretoglobin, fa | 4.60 | 3199 |
| 425498 | AL096725 | Hs.289010 | DKFZP434B103 protein | 4.59 | 1971 5267 |
| 445516 | R50291 | Hs.10846 | ESTs, Weakly similar to JH0783 diamine N | 4.58 | 3680 |
| 420626 | AF043722 | Hs.99491 | RAS guanyl releasing protein 2 (calcium | 4.58 | 1439 5083 |
| 408374 | AW025430 | Hs.155591 | forkhead box F1 | 4.57 | 261 |
| 440647 | BE397806 | | poly(A)-binding protein, cytoplasmic 1 | 4.56 | 3308 |
| 416986 | AI471952 | Hs.49776 | ESTs | 4.55 | 1048 |
| 416585 | X54162 | Hs.79386 | leiomodin 1, smooth muscle (LMOD1) (Thy | 4.53 | 1004 4964 |
| 407891 | AA486620 | Hs.41135 | endomucin-2 | 4.50 | 212 |
| 409064 | AA062954 | Hs.141883 | ESTs | 4.49 | 330 |
| 427164 | AB037721 | Hs.173871 | KIAA1300 protein | 4.39 | 2129 5332 |
| 426488 | X03350 | Hs.4 | alcohol dehydrogenase 1B (class I), beta | 4.36 | 2071 5307 |
| 410036 | R57171 | Hs.57975 | calsequestrin 2 (cardiac muscle) | 4.32 | 434 |
| 447205 | BE617015 | Hs.11006 | ESTs, Moderately similar to T17372 plasm | 4.29 | 3829 |
| 418307 | U70867 | Hs.83974 | solute carrier family 21 (prostaglandin | 4.27 | 1179 5008 |
| 441003 | BE172240 | Hs.126379 | ESTs, Weakly similar to I38022 hypotheti | 4.22 | 3324 |
| 414290 | AI568801 | Hs.71721 | ESTs | 4.22 | 808 |
| 423387 | AJ012074 | | vasoactive intestinal peptide receptor 1 | 4.19 | 1740 5178 |
| 413956 | AI821351 | Hs.193133 | ESTs, Weakly similar to ALU7_HUMAN ALU S | 4.16 | 770 |
| 417967 | BE244373 | Hs.1119 | nuclear receptor subfamily 4, group A, m | 4.15 | 1142 |
| 424711 | NM_005795 | Hs.152175 | calcitonin receptor-like | 4.12 | 1876 5227 |
| 427983 | M17706 | Hs.2233 | colony stimulating factor 3 (granulocyte | 4.12 | 2211 |
| 456676 | AI870001 | Hs.334479 | ESTs, Moderately similar to KIAA1139 pro | 4.10 | 4556 |
| 451245 | AA016218 | Hs.58231 | ESTs | 4.10 | 4203 |
| 424433 | H04607 | Hs.78061 | ESTs | 4.09 | 1844 |
| 452541 | AA022569 | Hs.29802 | slit (Drosophila) homolog 2 | 4.09 | 4324 |
| 424137 | AA335769 | Hs.16262 | ESTs | 4.09 | 1808 |
| 423334 | AK000906 | Hs.127273 | hypothetical protein FLJ10044 | 4.08 | 1737 5176 |
| 422640 | M37984 | Hs.118845 | troponin C, slow | 4.06 | 1667 5155 |
| 418807 | NM_004944 | Hs.88646 | deoxyribonuclease I-like 3 | 4.04 | 1242 5030 |
| 406923 | S70622 | | gb: G1 phase-specific gene {3′ region} [h | 4.04 | 110 4756 |
| 420556 | AA278300 | Hs.124292 | Homo sapiens cDNA: FLJ23123 fis, clone L | 4.03 | 1432 |
| 424054 | AA334511 | Hs.26638 | membrane-spanning 4-domains, subfamily A | 4.02 | 1796 |
| 441499 | AW298235 | Hs.101689 | ESTs | 4.02 | 3354 |
| 420256 | U84722 | Hs.76206 | cadherin 5, type 2, VE-cadherin (vascula | 4.02 | 1401 5071 |
| 427383 | NM_005411 | Hs.177582 | surfactant, pulmonary-associated protein | 4.01 | 2150 5337 |
| 433855 | AA834082 | Hs.307559 | ESTs | 3.99 | 2792 |
| 403421 | | | NM_016369*: Homo sapiens claudin 18 (CLDN | 3.98 | 45 4714 |
| 401929 | | | C17001690: gi\|6005701\|ref\|NP_009099.1\|AT | 3.98 | |
| 443577 | AI078033 | Hs.177170 | ESTs, Weakly similar to ALU8_HUMAN ALU S | 3.98 | 3530 |
| 445624 | AW140103 | Hs.78880 | ilvB (bacterial acetolactate synthase)-I | 3.97 | 3689 |
| 408614 | AL137698 | Hs.46531 | Homo sapiens mRNA; cDNA DKFZp434C1915 (f | 3.96 | 283 4802 |
| 420174 | AI824144 | Hs.199749 | ESTs | 3.96 | 1391 |
| 434975 | AA657884 | Hs.314413 | ESTs | 3.95 | 2885 |
| 418728 | AW970937 | Hs.293843 | ESTs | 3.95 | 1232 |
| 432231 | AA339977 | Hs.274127 | CLST 11240 protein | 3.94 | 2647 |
| 432894 | AW167668 | Hs.279772 | brain specific protein | 3.94 | 2709 |
| 435424 | AW083883 | Hs.37896 | Homo sapiens cDNA FLJ13510 fis, clone PL | 3.93 | 2914 |
| 427007 | NM_006283 | Hs.173159 | transforming, acidic coiled-coil contain | 3.91 | 2121 5329 |
| 430803 | AW951830 | Hs.283402 | TCR eta | 3.91 | 2514 |
| 446998 | N99013 | Hs.16762 | Homo sapiens mRNA; cDNA DKFZp564B2062 (f | 3.90 | 3810 |
| 419150 | T29618 | Hs.89640 | TEK tyrosine kinase, endothelial (venous | 3.90 | 1282 |
| 432740 | AF061034 | Hs.278898 | tumor necrosis factor alpha-inducible ce | 3.89 | 2698 5513 |
| 432519 | AI221311 | Hs.130704 | ESTs, Weakly similar to BCHUIA S-100 pro | 3.87 | 2676 |
| 454072 | AW572954 | Hs.252851 | ESTs | 3.87 | 4468 |
| 449261 | AI637592 | | ESTs | 3.86 | 4052 |
| 422195 | AB007903 | Hs.113082 | KIAA0443 gene product | 3.86 | 1614 5141 |
| 411988 | AA455459 | Hs.164480 | ESTs, Weakly similar to T50609 hypotheti | 3.84 | 599 |
| 453467 | AI535997 | Hs.30089 | ESTs | 3.83 | 4410 |
| 409882 | AJ243191 | Hs.56874 | heat shock 27 kD protein family, member 7 | 3.82 | 412 4833 |
| 414577 | AI056548 | Hs.72116 | hypothetical protein FLJ20992 similar to | 3.81 | 847 |
| 427418 | AA402587 | | LAT1-3TM protein | 3.79 | 2152 |
| 441723 | R72137 | Hs.7949 | DKFZP586B2420 protein | 3.77 | 3370 |
| 433614 | W07475 | Hs.277101 | cytochrome c oxidase subunit IV isoform | 3.76 | 2772 |
| 420043 | U08198 | Hs.1285 | complement component 8, gamma polypeptid | 3.74 | 1378 5062 |
| 425887 | AL049443 | Hs.161283 | Homo sapiens mRNA; cDNA DKFZp586N2020 (f | 3.74 | 2010 |
| 442262 | BE170651 | Hs.8700 | deleted in liver cancer 1 | 3.73 | 3408 |
| 447081 | Y13896 | Hs.17287 | potassium inwardly-rectifying channel, s | 3.72 | 3819 |
| 453355 | AW295374 | Hs.31412 | myopodin | 3.72 | 4400 |
| 417033 | H83784 | | KIAA0717 protein | 3.72 | 1055 |
| 458504 | AW070634 | Hs.144794 | ESTs | 3.72 | 4626 |
| 450954 | AI904740 | Hs.25691 | receptor (calcitonin) activity modifying | 3.69 | 4178 |
| 458816 | BE314567 | Hs.211440 | ESTs | 3.68 | 4639 |
| 401234 | | | mitogen-activated protein kinase 8 inter | 3.66 | |
| 456594 | U90545 | Hs.327179 | solute carrier family 17 (sodium phospha | 3.65 | 4553 5801 |
| 435823 | R07856 | Hs.16355 | ESTs | 3.63 | 2948 |
| 415775 | H00747 | Hs.29792 | ESTs, Weakly similar to I38022 hypotheti | 3.63 | 949 |
| 415386 | Z43087 | | gb: HSC13A121 normalized infant brain cDN | 3.62 | 929 |
| 415780 | U75898 | Hs.78846 | heat shock 27 kD protein 2 | 3.61 | 4954 950 |
| 448274 | AI268097 | Hs.67317 | Homo sapiens cDNA FLJ11775 fis, clone HE | 3.61 | 3954 |
| 434951 | AF161442 | Hs.191591 | Homo sapiens HSPC324 mRNA, partial cds | 3.60 | 2882 5559 |
| 425622 | AW360847 | Hs.16578 | ESTs | 3.60 | 1980 |
| 432985 | T92363 | Hs.178703 | ESTs | 3.60 | 2718 |
| 447265 | W23666 | | gb: zb46g08.r1 Soares_fetal_lung_NbHL19W | 3.59 | 3837 |
| 418965 | AI002238 | Hs.11482 | splicing factor, arginine/serine-rich 11 | 3.58 | 1264 |
| 450696 | AI654223 | Hs.16026 | hypothetical protein FLJ23191 | 3.58 | 4150 |
| 414593 | BE386764 | | gb: 601273249F1 NIH_MGC_20 Homo sapiens c | 3.58 | 851 |
| 447742 | AF113925 | Hs.19405 | caspase recruitment domain 4 | 3.57 | 3899 5699 |
| 426828 | NM_000020 | Hs.172670 | activin A receptor type II-like 1 | 3.56 | 2105 5323 |
| 451220 | AF124251 | Hs.26054 | novel SH2-containing protein 3 | 3.56 | 4200 5738 |
| 441503 | AW172263 | Hs.185202 | ESTs | 3.54 | 3355 |
| 447540 | AL135716 | Hs.263780 | ESTs | 3.53 | 3876 |
| 416157 | NM_003243 | Hs.342874 | transforming growth factor, beta recepto | 3.53 | 4956 977 |
| 420983 | W95228 | Hs.100764 | cathepsin G | 3.53 | 1472 |
| 413802 | AW964490 | Hs.32241 | ESTs, Weakly similar to S65657 alpha-1C- | 3.53 | 754 |
| 431971 | BE274907 | Hs.77385 | myosin, light polypeptide 6, alkali, smo | 3.53 | 2622 |
| 411085 | AF022991 | Hs.68398 | period (Drosophila) homolog 1 | 3.52 | 4861 532 |
| 455653 | BE154075 | | gb: PM0-HT0339-200400-010-E05 HT0339 Homo | 3.52 | 4518 |
| 403287 | | | Target Exon | 3.52 | |
| 406760 | AA829363 | | gb: of08g04.s1 NCI_CGAP_Co12 Homo sapiens | 3.50 | 98 |
| 425009 | X58288 | Hs.154151 | protein tyrosine phosphatase, receptor t | 3.49 | 1911 5243 |
| 442321 | AF207664 | Hs.8230 | a disintegrin-like and metalloprotease ( | 3.49 | 3416 5619 |
| 418381 | AA682393 | Hs.119237 | ESTs | 3.48 | 1193 |
| 455698 | BE068097 | | gb: CM1-BT0368-061299-060-c08 BT0368 Homo | 3.47 | 4519 |
| 419360 | AI148037 | | gb: qg61e01.r1 Soares_testis_NHT Homo sap | 3.46 | 1305 |
| 456589 | W79583 | Hs.104258 | Homo sapiens mRNA, exon 1, 2, 3, 4, clon | 3.44 | 4552 |
| 443932 | AW888222 | Hs.9973 | tensin | 3.43 | 3563 |
| 421341 | AJ243212 | | deleted in malignant brain tumors 1 | 3.43 | 1509 5102 |
| 442743 | AI801351 | Hs.302110 | ESTs, Weakly similar to MUC2_HUMAN MUCIN | 3.43 | 3465 |
| 411020 | NM_006770 | Hs.67726 | macrophage receptor with collagenous str | 3.43 | 4860 529 |
| 432485 | N90866 | Hs.276770 | CDW52 antigen (CAMPATH-1 antigen) | 3.43 | 2672 |
| 411962 | AA099050 | | gb: zk85d12.r1 Soares_pregnant_uterus_NbH | 3.42 | 594 |
| 443873 | AL048542 | Hs.16291 | ESTs | 3.42 | 3561 |
| 453874 | AW591783 | Hs.36131 | collagen, type XIV, alpha 1 (undulin) | 3.41 | 4440 |
| 454741 | BE154396 | | gb: CM2-HT0342-091299-050-b05 HT0342 Homo | 3.41 | 4495 |
| 403211 | | | NM_005400*: Homo sapiens protein kinase C | 3.39 | 44 4713 |
| 445107 | AI208121 | Hs.147313 | ESTs, Weakly similar to I38022 hypotheti | 3.39 | 3653 |
| 444769 | AI191650 | Hs.221436 | ESTs | 3.38 | 3626 |
| 448323 | AI492298 | Hs.170915 | ESTs | 3.37 | 3957 |
| 457567 | AW939074 | | gb: QV1-DT0069-010200-057-c12 DT0069 Homo | 3.36 | 4594 |
| 424423 | N56160 | Hs.32916 | nascent-polypeptide-associated complex a | 3.35 | 1843 |
| 451735 | AW407892 | | ESTs | 3.35 | 4244 |
| 421326 | AF051428 | Hs.103504 | estrogen receptor 2 (ER beta) | 3.33 | 1507 5101 |
| 446804 | AW572304 | Hs.271260 | ESTs, Moderately similar to dJ63G5.3 [H. | 3.32 | 3789 |
| 414358 | AA476456 | Hs.142614 | ESTs | 3.32 | 815 |
| 430212 | AA469153 | | gb: nc67f04.s1 NCI_CGAP_Pr1 Homo sapiens | 3.31 | 2455 |
| 436061 | AI248584 | Hs.190745 | Homo sapiens cDNA: FLJ21326 fis, clone C | 3.31 | 2961 |
| 414424 | BE296309 | Hs.125902 | ubiquitin specific protease 2 | 3.31 | 826 |
| 440288 | D81015 | Hs.125382 | ESTs | 3.31 | 3278 |
| 414121 | AA151719 | Hs.95834 | ESTs | 3.30 | 790 |
| 410118 | AW590680 | | von Willebrand factor | 3.28 | 448 |
| 433633 | AI880516 | Hs.84630 | ESTs, Weakly similar to 2004399A chromos | 3.28 | 2775 |
| 417302 | BE245812 | Hs.8941 | ESTs | 3.28 | 1078 |
| 417451 | AW007280 | Hs.115537 | putative dipeptidase | 3.27 | 1096 |
| 448515 | H68441 | Hs.13528 | hypothetical protein FLJ14054 | 3.27 | 3979 |
| 423196 | AK001866 | Hs.125139 | hypothetical protein FLJ11004 | 3.26 | 1726 5173 |
| 404179 | | | Target Exon | 3.26 | |
| 413591 | AA130636 | Hs.188677 | ESTs | 3.26 | 738 |
| 447560 | AF065214 | Hs.18858 | phospholipase A2, group IVC (cytosolic, | 3.24 | 3879 5692 |
| 417075 | R54506 | Hs.118795 | hypothetical protein FLJ10008 | 3.24 | 1061 |
| 456855 | AF035528 | Hs.153863 | MAD (mothers against decapentaplegic, Dr | 3.23 | 4564 5802 |
| 421952 | AA300900 | Hs.98849 | dynein light chain 2B (DNLC2B) | 3.22 | 1584 |
| 434190 | AA627122 | Hs.147644 | ESTs | 3.21 | 2819 |
| 452816 | AA131789 | Hs.61509 | ESTs | 3.21 | 4346 |
| 406702 | Z20656 | | myosin, heavy polypeptide 6, cardiac mus | 3.21 | 4752 90 |
| 415126 | D60945 | | gb: HUM141D04B Clontech human fetal brain | 3.21 | 909 |
| 439484 | AW970218 | Hs.135254 | Homo sapiens clone 1 thrombospondin mRNA | 3.21 | 3211 |
| 429283 | R13008 | Hs.276748 | ESTs | 3.21 | 2349 |
| 433688 | AA628467 | Hs.112572 | Homo sapiens cDNA FLJ14130 fis, clone MA | 3.21 | 2780 |
| 437275 | AW976035 | Hs.292396 | ESTs, Weakly similar to A47582 B-cell gr | 3.20 | 3054 |
| 429580 | AA346839 | Hs.209100 | DKFZP434C171 protein | 3.19 | 2390 |
| 424580 | AA446539 | Hs.339024 | ESTs, Weakly similar to A46010 X-linked | 3.19 | 1860 |
| 426309 | AI912555 | Hs.157195 | peptide YY, 2 (seminalplasmin) | 3.19 | 2049 |
| 438411 | H91928 | Hs.169370 | gb: ys81c10.r1 Soares retina N2b4HR Homo | 3.18 | 3137 |
| 406329 | | | Target Exon | 3.18 | |
| 422686 | BE180557 | Hs.22588 | ESTs | 3.17 | 1674 |
| 447578 | AA912347 | Hs.136585 | ESTs, Weakly similar to JC5314 CDC28/cdc | 3.17 | 3882 |
| 456703 | W07492 | Hs.157101 | ESTs | 3.16 | 4557 |
| 418021 | M15881 | Hs.1137 | uromodulin (uromucoid, Tamm-Horsfall gly | 3.16 | 1147 4999 |
| 447896 | AI436124 | Hs.294069 | Homo sapiens cDNA FLJ13384 fis, clone PL | 3.16 | 3920 |
| 453989 | M63962 | Hs.36992 | ATPase, H? exchanging, alpha polypeptide | 3.16 | 4458 5791 |
| 423488 | AW748714 | Hs.194720 | gb: QV3-BT0294-241199-025-c01 BT0294 Homo | 3.16 | 1751 |
| 417696 | BE241624 | Hs.82401 | CD69 antigen (p60, early T-cell activati | 3.16 | 1113 |
| 420937 | AW966719 | Hs.1340 | colipase, pancreatic | 3.15 | 1466 |
| 443679 | AK001810 | Hs.9670 | hypothetical protein FLJ10948 | 3.15 | 3538 5630 |
| 414325 | AA251929 | | ESTs, Weakly similar to unnamed protein | 3.15 | 812 |
| 459073 | AW968616 | Hs.296234 | ESTs, Weakly similar to T31613 hypotheti | 3.15 | 4655 |
| 428540 | AA430001 | Hs.279755 | ESTs | 3.14 | 2268 |
| 433735 | AA608955 | Hs.109653 | ESTs | 3.14 | 2784 |
| 424455 | AA452006 | Hs.333199 | calcium channel, voltage-dependent, gamm | 3.14 | 1847 |
| 440636 | AA897395 | Hs.202248 | ESTs, Weakly similar to T12525 hypotheti | 3.12 | 3307 |
| 450119 | AI683447 | Hs.264371 | ESTs, Weakly similar to M3K3_HUMAN MITOG | 3.12 | 4105 |
| 414516 | AI307802 | | ESTs, Weakly similar to T43458 hypotheti | 3.11 | 838 |
| 422126 | AW973784 | Hs.112028 | Misshapen/NIK-related kinase | 3.10 | 1605 |
| 450240 | AA236063 | Hs.62954 | ferritin, heavy polypeplide 1 | 3.09 | 4117 |
| 435916 | AW001885 | Hs.114103 | ESTs | 3.08 | 2952 |
| 403875 | | | Target Exon | 3.08 | |
| 440098 | AA864798 | Hs.186180 | Homo sapiens cDNA: FLJ23038 fis, clone L | 3.08 | 3262 |
| 412442 | AI983730 | Hs.26530 | serum deprivation response (phosphatidyl | 3.07 | 631 |
| 428434 | AW363590 | Hs.65551 | Homo sapiens, Similar to DNA segment, Ch | 3.06 | 2256 |
| 452547 | AA335295 | Hs.74120 | adipose specific 2 | 3.05 | 4325 |
| 457661 | AA917801 | Hs.125910 | ESTs | 3.05 | 4598 |
| 407102 | AA007629 | | glycerol-3-phosphate dehydrogenase 1 (so | 3.05 | 123 |
| 438137 | AA778759 | Hs.271690 | ESTs | 3.05 | 3120 |
| 444325 | AW152618 | Hs.16757 | ESTs | 3.05 | 3588 |
| 458871 | AI990292 | Hs.225457 | ESTs | 3.04 | 4642 |
| 426411 | AK000708 | Hs.169764 | hypothetical protein FLJ20701 | 3.04 | 2064 5302 |
| 448782 | AL050295 | | G-protein coupled receptor 116 (GPR116) | 3.04 | 4006 5713 |
| 428224 | X54017 | Hs.183088 | acrosin | 3.04 | 2230 5352 |
| 450749 | AI733114 | Hs.130169 | ESTs | 3.03 | 4160 |
| 407139 | W81598 | | gb: zd88g02.s1 Soares_fetal_heart_NbHH19W | 3.03 | 129 |
| 446932 | AA961459 | Hs.125644 | ESTs | 3.03 | 3802 |
| 422221 | AA306649 | Hs.169370 | FYN oncogene related to SRC, FGR, YES | 3.02 | 1615 |
| 421275 | AW029312 | Hs.99693 | ESTs | 3.02 | 1501 |
| 412351 | AL135960 | Hs.73828 | T-cell acute lymphocytic leukemia 1 | 3.01 | 626 |
| 451556 | AW242829 | Hs.144094 | ESTs, Weakly similar to I38600 zinc fing | 3.01 | 4228 |
| 452664 | AA398859 | Hs.18397 | hypothetical protein FLJ23221 | 3.01 | 4331 |
| 452877 | AI250789 | Hs.32478 | ESTs | 3.00 | 4356 |
| 427890 | AA435761 | | ESTs | 3.00 | 2203 |
| 434666 | AF151103 | Hs.112259 | T cell receptor gamma locus | 3.00 | 2859 5551 |
| 450400 | AI694722 | Hs.279744 | ESTs | 3.00 | 4137 |
| 428287 | AF045239 | Hs.321576 | ring finger protein 22 | 3.00 | 2237 5353 |
| 425023 | AW956889 | Hs.154210 | EDG-1 (endothelial differentiation, sph | 3.00 | 1913 |

[0365] TABLE 10B

| Pkey | CAT number | Accession |
|---|---|---|
| 409385 | 110758_1 | T65940 T64515 AA071267 AA071334 |
| 422667 | 224778_1 | AI758223 AW469334 BF940841 AW080348 AI270363 AI055892 |
| | | BE464168 BF431797 BE350144 BF448739 AI693409 BF432999 D62848 AA398070 |
| | | AI383375 AW611490 |
| 439745 | 7961_1 | AL389981 BM023607 BF475999 AI247103 AA838550 AA662305 AA838548 |
| 440647 | 12847_7 | BE397806 BG823998 AI573099 AV725593 AA864452 AA883096 BG059834 |
| | | AV661708 BE561462 BF804447 |
| 423387 | 2612_2 | L13288 AA928785 AI608912 AW872978 AA565655 AI022915 AI304920 AI564366 |
| | | AI668793 AI094557 T60038 R72302 H45409 AA508805 R46356 AA418798 BM129553 |
| | | BM129126 BM129292 BM128865 AI808418 AI689932 AI806573 BF431808 AW872985 |
| | | AW166269 H73241 T16182 AI264547 R73391 R72085 R72840 T83751 X75299 BF754348 |
| | | R94105 AW449839 R73300 NM_004624 AI797007 BE045543 BF110021 BF754250 |
| | | T83923 AW884084 AA903896 AA418962 L20295 R72351 H45098 AA961010 R73210 |
| | | R46451 AW884085 BI022902 BI763932 BI910138 |
| 449261 | 3029652_1 | AI923721 AI860294 AI637592 |
| 427418 | MH1660_94 | AI633280 AW002589 AI760178 AI911270 AI277654 AI184927 AA402587 |
| | | AA402398 AA455831 |
| 417033 | 37085_1 | BC020779 AI857902 AI816715 AI936084 BE044451 AA688029 AW975331 |
| | | AA192427 AA661735 F24489 AI382922 AI659751 F26660 F19507 F31628 AY037148 BF852989 |
| | | BF852995 BF853000 BF853928 BF853920 BF846065 BF846063 BF848191 BF848190 BF853537 |
| | | AA194737 BI010755 H83784 BG203405 BF853580 BF848198 BG545668 BF846059 BI010793 BI010796 |
| | | AI218954 F28028 BF854481 BF846558 AA903899 AA854779 F33888 H83927 F25113 F36903 |
| | | BG214764 AI863957 F26013 F26233 F20527 W37255 W32197 AA192426 AA902491 W33189 |
| | | W32232 BG483879 BF846130 AA661823 |
| 415386 | 11281_5 | R95033 H15506 Z43087 F07410 H54108 H98000 |
| 447265 | 1227845_1 | AW962578 AI370391 W23666 |
| 414593 | 58970_4 | BE386764 AL603555 |
| 455653 | 200977_1 | BF820280 BE154075 BE154018 BE153509 BE153973 BE064861 BE065075 |
| | | BE064684 BE153602 BE153852 BE153847 BE064772 BE064842 BE153557 |
| 406760 | 0_0 | AA829363 |
| 455698 | 1492345_1 | BE068097 BE068148 BE068162 BE068145 BE068200 BE068158 BE068202 |
| | | BE068086 BE068193 BE068091 |
| 419360 | 250410_1 | AA236756 AA287178 AI148037 |
| 421341 | 1407_1 | NM_007329 AF159456 AJ243212 AJ297935 AA295769 NM_017579 |
| | | AJ243224 AI492875 AI796676 AI749838 AA918144 AI814590 AI923531 BF513992 |
| | | AI720725 AI150879 AI279072 AW612904 AI492104 AI284510 AI141231 AA613554 |
| | | AW662148 AW769047 AA565985 AW612888 AU100513 BG955585 BG955588 |
| | | AA295763 BE829414 BF760645 BG954398 AA295332 AA295795 BE932867 |
| | | AW769569 T89953 BE934311 |
| 411962 | 2307710_1 | AA099050 AA099526 T47733 |
| 454741 | 220369_1 | BE154396 BF846839 AW842318 AW817959 BE154393 BI050168 |
| 457567 | 1028609_1 | AW970057 AW939073 AW940012 AW939074 AW939938 AW939206 AW939076 |
| | | AA574383 BE160476 AA573577 AW750479 |
| 451735 | 480028_1 | BG113814 AW407892 AI812096 AW076043 |
| 430212 | 1404178_1 | AI718503 AA469225 AA469153 |
| 410118 | MH1429_162 | AU140255 AW590680 BI051042 R91271 H68390 |
| 406702 | 0_0 | NA |
| 415126 | 1857706_1 | D61346 D60945 D80539 D81568 |
| 414325 | 16029_1 | AK055560 AI223830 AW371603 AA564436 AA251799 |
| | | AA143235 AA975269 AI565174 AI927242 AI052812 AA405571 AW103340 AI289757 |
| | | AI472362 N26127 AI167485 AA826503 AI051406 AI431964 BG434126 AA282258 |
| | | AA808282 BI766582 BE064109 BE064103 BE064088 BE064086 BE064115 BE064066 |
| | | AA282732 |
| 414516 | 60847_1 | AK057782 AI146454 BG703115 AI765980 AI948611 AA889263 AA947457 |
| | | BG547193 H11947 Z38147 F10426 BF447329 H11946 T74968 F06195 BG548563 |
| | | AI004988 AA148735 AI307802 AI439791 BE041453 AI984904 AA148734 F12823 |
| 407102 | 7177_2 | AW945170 BF930905 F33652 BG057818 AI368018 AI421485 AI300352 AI378525 AI264177 |
| | | AI276281 AI245302 AI281050 AI190036 AW451438 AW242903 AA910870 F22289 |
| | | F19647 F22375 AW473816 BF445785 AA774528 F33447 C01077 AW772227 F17759 |
| | | H42812 R09701 AA349096 R48772 H42892 H42537 R47898 N28263 H25721 |
| | | F32386 H43971 R48205 F21390 H45809 AA007629 R47897 R83734 H45844 AW983653 |
| | | H43970 H42536 H24495 R48875 H42961 H22079 R86018 |
| 448782 | 34980_1 | AB018301 AL050295 BF513128 AW385080 AL551708 AI352542 AI829703 AI819388 |
| | | AW629019 AW073189 AW273857 AW118768 AI453845 AI452494 AA886341 AI057144 |
| | | AA904647 AI423547 AW263913 AI094774 AI434419 AI039546 AI002491 AI240412 |
| | | Z25099 AA995178 AW050649 AW026140 AI796309 AI584012 BE166666 AI767991 |
| | | AI309041 AA724059 AI695284 AI245095 T63971 Z40627 BE166681 BG570071 |
| | | BF921915 BI562702 BG506502 AV658066 R48378 AA121543 AI096938 AA618131 |
| | | H40993 R48277 AI352281 BG540263 BG538901 N95226 AI356752 AI221152 Z28777 |
| | | R16574 AW966449 AA044116 AW797518 BI010405 AA044288 AI093508 BE140169 |
| | | T64039 BG433106 AW130367 AW130361 N73937 AA127680 AW044037 AI096437 |
| | | AA384077 BF941499 T93764 BG003285 |
| 427890 | 1373988_1 | AA417099 AA435761 AA972917 AI660387 |

Pkey: Unique Eos probeset identifier number
CAT number: Gene cluster number
Accession: Genbank accession numbers

[0366] TABLE 10C

| Pkey | Ref | Strand | Nt_position |
|---|---|---|---|
| 404246 | 7406725 | Plus | 82477-82628, 82721-82817, |
| | | | 82910-83071, 8314 |
| 401974 | 3126777 | Plus | 85330-85683 |
| 403421 | 9665041 | Minus | 126609-126773, 139986-140205 |
| 401929 | 3810670 | Minus | 3167-3286, 4216-4310 |
| 401234 | 9929642 | Plus | 120173-120337 |
| 403287 | 8080320 | Minus | 126097-126411 |
| 403211 | 7630841 | Minus | 159211-159369 |
| 404179 | 4902741 | Plus | 34276-34463 |
| 406329 | 6982072 | Minus | 607903-608271 |
| 403875 | 7709294 | Plus | 28026-28223 |

Pkey: Unique number corresponding to an Eos probeset
Sequence source. The 7 digit numbers in this column are Genbank Identifier (GI) numbers. “Dunham I. et al.” refers to the publication entitled “The DNA sequence of human chromosome 22.” Dunham I. et al., Nature (1999) 402: 489-495.
Strand: Indicates DNA strand from which exons were predicted.
Nt_position: Indicates nucleotide positions of predicted exons.

[0367] TABLE 11A
About 1198 genes upregulated in breast and lung metastases to the brain relative to normal body tissues

| | |
|---|---|
| Pkey: | Unique Eos probeset identifier number |
| ExAccn: | Exemplar Accession number, Genbank accession number |
| UniGeneID: | UniGene number |
| UniGene Title: | UniGene gene title |
| R1: | 90th percentile of breast and lung metastases to the brain Als divided by the 90th percentile of |
| | normal body tissue Als, where the 15th percentile of all normal body tissue Als was subtracted |
| | from the numerator and denominator. |
| SEQ ID NO(s): | SEQ ID number(s) for nucleic acid and protein sequences associated with table entry. |

| Pkey | ExAccn | UniGeneID | UniGene Title | R1 | SEQ ID NO(S): |
|---|---|---|---|---|---|
| 408591 | AF015224 | Hs.46452 | mammaglobin 1 | 46.40 | 281 4801 |
| 457200 | U33749 | Hs.197764 | thyroid transcription factor 1 | 22.40 | 4582 5812 |
| 414517 | M24461 | Hs.76305 | surfactant, pulmonary-associated protein | 20.52 | 4920 839 |
| 429170 | NM_001394 | Hs.2359 | dual specificity phosphatase 4 | 19.50 | 2336 5392 |
| 419078 | M93119 | Hs.89584 | insulinoma-associated 1 | 19.40 | 1272 5036 |
| 452838 | U65011 | Hs.30743 | preferentially expressed antigen in mela | 15.85 | 4353 5765 |
| 409103 | AF251237 | Hs.112208 | XAGE-1 protein | 15.68 | 333 4812 |
| 426283 | NM_003937 | Hs.169139 | kynureninase (L-kynurenine hydrolase) | 15.20 | 2048 5297 |
| 425057 | AA826434 | Hs.1619 | achaete-scute complex (Drosophila) homol | 14.85 | 1915 |
| 432441 | AW292425 | Hs.163484 | intron of hepatocyte nuclear factor-3 al | 14.40 | 2668 |
| 418738 | AW388633 | Hs.6682 | solute carrier family 7, (cationic amino | 13.85 | 1234 |
| 407276 | AI951118 | Hs.326736 | Homo sapiens breast cancer antigen NY-BR | 13.80 | 147 |
| 443171 | BE281128 | Hs.9030 | TONDU | 13.05 | 3501 |
| 427344 | NM_000869 | Hs.2142 | 5-hydroxytryptamine (serotonin) receptor | 12.25 | 2145 5336 |
| 431164 | AA493650 | Hs.94367 | thyroid transcription factor 1 | 11.50 | 2534 |
| 432415 | T16971 | Hs.289014 | ESTs, Weakly similar to A43932 mucin 2 p | 10.85 | 2665 |
| 457465 | AW301344 | Hs.122908 | DNA replication factor | 10.25 | 4592 |
| 422656 | AI870435 | Hs.1569 | LIM homeobox protein 2 | 10.15 | 1668 |
| 410102 | AW248508 | Hs.279727 | ESTs; homologue of PEM-3 [Ciona savignyi | 10.00 | 446 |
| 409269 | AA576953 | Hs.22972 | steroid 5 alpha-reductase 2-like; H5AR g | 10.00 | 358 |
| 429441 | AJ224172 | Hs.204096 | lipophilin B (uteroglobin family member) | 9.62 | 2371 5407 |
| 453884 | AA355925 | Hs.36232 | KIAA0186 gene product | 9.30 | 4444 |
| 409041 | AB033025 | Hs.50081 | Hypothetical protein, XP_051860 (KIAA119 | 9.15 | 327 4811 |
| 429228 | AI553633 | | hypothetical protein MGC33630 | 8.77 | 2340 |
| 451807 | W52854 | | hypothetical protein FLJ23293 similar to | 8.75 | 4249 |
| 417576 | AA339449 | Hs.82285 | phosphoribosylglycinamide formyltransfer | 8.55 | 1102 |
| 444342 | NM_014398 | Hs.10887 | similar to lysosome-associated membrane | 8.20 | 3591 5638 |
| 447342 | AI199268 | Hs.19322 | Homo sapiens, Similar to RIKEN cDNA 2010 | 8.10 | 3845 |
| 443715 | AI583187 | Hs.9700 | cyclin E1 | 8.05 | 3544 |
| 447033 | AI357412 | Hs.157601 | Predicted gene: Eos cloned; secreted w/V | 8.05 | 3814 |
| 444783 | AK001468 | Hs.62180 | anillin (Drosophila Scraps homolog), act | 7.75 | 3628 5645 |
| 425211 | M18667 | Hs.1867 | progastricsin (pepsinogen C) | 7.67 | 1936 5251 |
| 445413 | AA151342 | Hs.12677 | CGI-147 protein | 7.65 | 3675 |
| 439926 | AW014875 | Hs.137007 | ESTs | 7.36 | 3243 |
| 405770 | | | NM_002362: Homo sapiens melanoma antigen, | 7.34 | 4740 74 |
| 413585 | AI133452 | Hs.75431 | fibrinogen, gamma polypeptide | 7.15 | 737 |
| 404561 | | | trichorhinophalangeal syndrome I gene (T | 7.15 | |
| 439979 | AW600291 | Hs.6823 | hypothetical protein FLJ10430 | 7.12 | 3251 |
| 425843 | BE313280 | Hs.159627 | death associated protein 3 | 7.11 | 2003 |
| 450705 | U90304 | Hs.25351 | iroquois homeobox protein 2A (IRX-2A) ( | 7.10 | 4153 5734 |
| 444670 | H58373 | Hs.332938 | hypothetical protein MGC5370 | 7.10 | 3618 |
| 418164 | AI761820 | Hs.41074 | ESTs, Weakly similar to I39294 McLeod sy | 7.05 | 1165 |
| 421798 | N74880 | | N-acylsphingosine amidohydrolase (acid c | 7.03 | 1564 |
| 448275 | BE514434 | Hs.20830 | kinesin-like 2 | 6.95 | 3955 |
| 428342 | AI739168 | | Homo sapiens cDNA FLJ13458 fis, clone PL | 6.90 | 2244 |
| 409557 | BE182896 | Hs.3686 | ESTs | 6.85 | 384 |
| 400292 | AA250737 | Hs.72472 | BMP-R1B (bone morphogenetic protein rec | 6.75 | 6 |
| 425234 | AW152225 | Hs.165909 | ESTs, Weakly similar to I38022 hypotheti | 6.72 | 1940 |
| 428771 | AB028992 | Hs.193143 | KIAA1069 protein | 6.65 | 2295 5375 |
| 400205 | | | NM_006265*: Homo sapiens RAD21 (S. pombe) | 6.65 | 1 4680 |
| 416208 | AW291168 | Hs.41295 | ESTs, Weakly similar to MUC2_HUMAN MUCIN | 6.65 | 981 |
| 457211 | AW972565 | Hs.32399 | ESTs, Weakly similar to S51797 vasodilat | 6.63 | 4583 |
| 409420 | Z15008 | Hs.54451 | laminin, gamma 2 (nicein (100 kD), kalini | 6.60 | 368 4824 |
| 448664 | AI879317 | Hs.334691 | splicing factor 3a, subunit 1, 120 kD | 6.55 | 3994 |
| 430300 | U60805 | Hs.238648 | oncostatin M receptor | 6.40 | 2465 5441 |
| 408771 | AW732573 | Hs.47584 | potassium voltage-gated channel, delayed | 6.35 | 305 |
| 401451 | | | NM_004496*: Homo sapiens hepatocyte nucle | 6.33 | 27 4697 |
| 433029 | NM_014322 | Hs.279926 | opsin 3 (encephalopsin) | 6.28 | 2726 5524 |
| 430044 | AA464510 | Hs.152812 | ESTs | 6.25 | 2439 |
| 452259 | AA317439 | Hs.28707 | signal sequence receptor, gamma (translo | 6.20 | 4290 |
| 426471 | M22440 | Hs.170009 | transforming growth factor, alpha | 6.15 | 2068 5305 |
| 428004 | AA449563 | Hs.151393 | glutamate-cynteine ligase, catalytic sub | 6.15 | 2213 |
| 427528 | AU077143 | Hs.179565 | minichromosome maintenance deficient (S. | 6.11 | 2161 |
| 416294 | D86980 | Hs.79170 | KIAA0227 protein | 6.10 | 4958 984 |
| 439963 | AW247529 | Hs.6793 | platelet-activating factor acetylhydrola | 6.06 | 3250 |
| 401519 | | | C15000476*: gi\|12737279\|ref\|XP_012163.1\| | 6.05 | |
| 420281 | AI623693 | Hs.323494 | Predicted cation efflux pump | 6.05 | 1405 |
| 408908 | BE296227 | Hs.250822 | serine/threonine kinase 15 | 6.05 | 317 |
| 436217 | T53925 | Hs.107 | fibrinogen-like 1 | 6.01 | 2968 |
| 415138 | C18356 | Hs.295944 | tissue factor pathway inhibitor 2 | 6.00 | 910 |
| 408045 | AW138959 | Hs.245123 | ESTs | 5.95 | 227 |
| 433675 | AW977653 | Hs.75319 | ribonucleotide reductase M2 polypeptide | 5.95 | 2779 |
| 408298 | AI745325 | Hs.271923 | Homo sapiens cDNA: FLJ22785 fis, clone K | 5.95 | 253 |
| 431548 | AI834273 | Hs.9711 | novel protein | 5.85 | 2564 |
| 407999 | AI126271 | Hs.49433 | ESTs, Weakly similar to YZ28_HUMAN HYPOT | 5.83 | 222 |
| 407378 | AA299264 | Hs.57776 | ESTs, Moderately similar to I38022 hypot | 5.65 | 160 |
| 445903 | AI347487 | Hs.132781 | class I cytokine receptor | 5.65 | 3711 |
| 401866 | | | Target Exon | 5.65 | |
| 458814 | AI498957 | Hs.170861 | ESTs, Weakly similar to Z195_HUMAN ZINC | 5.61 | 4638 |
| 440351 | AF030933 | Hs.7179 | RAD1 (S. pombe) homolog | 5.60 | 3285 5607 |
| 452461 | N78223 | Hs.108106 | transcription factor | 5.60 | 4311 |
| 424140 | Z48051 | Hs.141308 | myelin oligodendrocyte glycoprotein | 5.60 | 1809 5200 |
| 400291 | AA401369 | | downstream of breast cancer antigen NY-B | 5.55 | 5 |
| 429597 | NM_003816 | Hs.2442 | a disintegrin and metalloproteinase doma | 5.51 | 2392 5412 |
| 439580 | AF086401 | Hs.293847 | ESTs, Moderately similar to S65657 alpha | 5.45 | 3220 |
| 439772 | AL365406 | Hs.10268 | Homo sapiens mRNA full length insert cDN | 5.45 | 3234 |
| 443695 | AW204099 | | ESTs, Weakly similar to AF126780 1 retin | 5.45 | 3541 |
| 437834 | AA769294 | | gb: nz36g03.s1 NCI_CGAP_GCB1 Homo sapiens | 5.35 | 3096 |
| 430287 | AW182459 | Hs.125759 | ESTs, Weakly similar to LEU5_HUMAN LEUKE | 5.30 | 2460 |
| 433485 | AI493076 | Hs.306098 | aldo-keto reductase family 1, member C2 | 5.30 | 2766 |
| 423739 | AA398155 | Hs.97600 | ESTs | 5.30 | 1771 |
| 438915 | AA280174 | Hs.285681 | Williams-Beuren syndrome chromosome regi | 5.25 | 3178 |
| 419875 | AA853410 | Hs.93557 | proenkephalin | 5.24 | 1365 |
| 424834 | AK001432 | Hs.153408 | Homo sapiens cDNA FLJ10570 fis, clone NT | 5.23 | 1889 |
| 437915 | AI637993 | Hs.202312 | Homo sapiens clone N11 NTera2D1 teratoca | 5.20 | 3105 |
| 419743 | AW408762 | Hs.5957 | Homo sapiens clone 24416 mRNA sequence | 5.15 | 1356 |
| 427944 | AA417878 | Hs.48401 | ESTs, Moderately similar to ALU8_HUMAN A | 5.15 | 2205 |
| 433023 | AW864793 | | thrombospondin 1 | 5.15 | 2725 |
| 420234 | AW404908 | Hs.96038 | Ric (Drosophila)-like, expressed in many | 5.14 | 1399 |
| 427365 | AI873274 | | downstream of breast cancer antigen NY-B | 5.14 | 2148 |
| 416933 | BE561850 | Hs.80506 | small nuclear ribonucleoprotein polypept | 5.13 | 1040 |
| 421502 | AF111856 | Hs.105039 | solute carrier family 34 (sodium phospha | 5.12 | 1527 5110 |
| 410340 | AW182833 | Hs.112188 | hypothetical protein FLJ13149 | 5.10 | 466 |
| 441031 | AI110684 | Hs.7645 | fibrinogen, B beta polypeptide | 5.10 | 3329 |
| 412140 | AA219691 | Hs.73625 | RAB6 interacting, kinesin-like (rabkines | 5.08 | 613 |
| 422486 | BE514492 | Hs.117487 | gene near HD on 4p16.3 with homology to | 5.05 | 1648 |
| 424905 | NM_002497 | Hs.153704 | NIMA (never in mitosis gene a)-related k | 5.05 | 1898 5237 |
| 433409 | AI278802 | Hs.25661 | ESTs | 5.02 | 2761 |
| 422756 | AA441787 | Hs.119689 | glycoprotein hormones, alpha polypeptide | 5.00 | 1679 |
| 424179 | F30712 | Hs.334573 | Homo sapiens, clone IMAGE: 4285740, mRNA | 5.00 | 1812 |
| 426318 | AA375125 | Hs.147112 | Homo sapiens cDNA: FLJ22322 fis, clone H | 5.00 | 2051 |
| 432378 | AI493046 | Hs.146133 | ESTs | 4.95 | 2662 |
| 416111 | AA033813 | Hs.79018 | chromatin assembly factor 1, subunit A ( | 4.95 | 972 |
| 441377 | BE218239 | Hs.202656 | ESTs | 4.95 | 3349 |
| 426827 | AW067805 | Hs.172665 | methylenetetrahydrofolate dehydrogenase | 4.94 | 2104 |
| 432886 | BE159028 | Hs.279704 | chromatin accessibility complex 1 | 4.93 | 2708 |
| 433862 | D86960 | Hs.3610 | KIAA0205 gene product | 4.93 | 2793 5542 |
| 423242 | AL039402 | Hs.125783 | DEME-6 protein | 4.91 | 1730 |
| 413450 | Z99716 | Hs.75372 | N-acetylgalactosaminidase, alpha- | 4.90 | 4901 723 |
| 403485 | | | C3001813*: gi\|12737279\|ref\|XP_012163.1\|k | 4.90 | |
| 416000 | R82342 | Hs.79856 | ESTs, Weakly similar to S65657 alpha-1C- | 4.90 | 965 |
| 410555 | U92649 | Hs.64311 | a disintegrin and metalloproteinase doma | 4.86 | 4851 492 |
| 415786 | AW419196 | Hs.257924 | hypothetical protein FLJ13782 | 4.85 | 951 |
| 450149 | AW969781 | Hs.132863 | Zic family member 2 (odd-paired Drosophi | 4.85 | 4106 |
| 424800 | AL035588 | Hs.153203 | MyoD family inhibitor | 4.81 | 1888 5232 |
| 423554 | M90516 | Hs.1674 | glutamine-fructose-6-phosphate transamin | 4.80 | 1758 5182 |
| 415989 | AI267700 | | ESTs | 4.80 | 963 |
| 424602 | AK002055 | Hs.151046 | hypothetical protein FLJ11193 | 4.80 | 1863 5219 |
| 442760 | BE075297 | Hs.6614 | ESTs, Weakly similar to A43932 mucin 2 p | 4.80 | 3466 |
| 458098 | BE550224 | | metallothionein 1E (functional) | 4.80 | 4611 |
| 422880 | AF228704 | Hs.193974 | glutathione reductase | 4.75 | 1689 5161 |
| 414343 | AL036166 | Hs.75914 | coated vesicle membrane protein | 4.75 | 814 |
| 441285 | NM_002374 | Hs.167 | microtubule-associated protein 2 | 4.75 | 3343 5616 |
| 401464 | | | histone deacetylase 5 | 4.70 | |
| 412537 | AL031778 | | nuclear transcription factor Y, alpha | 4.70 | 644 |
| 423453 | AW450737 | Hs.128791 | CGI-09 protein | 4.70 | 1748 |
| 437387 | AI198874 | Hs.28847 | AD026 protein | 4.66 | 3062 |
| 452526 | W38537 | Hs.280740 | hypothetical protein MGC3040 | 4.65 | 4322 |
| 424085 | NM_002914 | Hs.139226 | replication factor C (activator 1) 2 (40 | 4.65 | 1803 5198 |
| 413753 | U17760 | Hs.75517 | laminin, beta 3 (nicein (125 kD), kalinin | 4.65 | 4906 750 |
| 407137 | T97307 | | gb: ye53h05.s1 Soares fetal liver spleen | 4.62 | 128 |
| 444858 | AI199738 | Hs.208275 | ESTs, Weakly similar to ALUA_HUMAN !!!! | 4.60 | 3633 |
| 413597 | AW302885 | Hs.117183 | ESTs | 4.60 | 739 |
| 448105 | AW591433 | Hs.298241 | Transmembrane protease, serine 3 | 4.59 | 3943 |
| 446872 | X97058 | Hs.16362 | pyrimidinergic receptor P2Y, G-protein c | 4.52 | 3796 5678 |
| 407756 | AA116021 | Hs.38260 | ubiquitin specific protease 18 | 4.51 | 191 |
| 432731 | R31178 | Hs.287820 | fibronectin 1 | 4.47 | 2695 |
| 421227 | R78581 | Hs.266308 | mosaic serine protease | 4.45 | 1492 |
| 418661 | NM_001949 | Hs.1189 | E2F transcription factor 3 | 4.45 | 1222 5022 |
| 438378 | AW970529 | Hs.86434 | hypothetical protein FLJ21816 | 4.45 | 3136 |
| 447519 | U46258 | Hs.339665 | ESTs | 4.44 | 3873 |
| 423673 | BE003054 | Hs.1695 | matrix metalloproteinase 12 (macrophage | 4.40 | 1765 |
| 404996 | | | Target Exon | 4.40 | |
| 441790 | AW294909 | Hs.132208 | ESTs | 4.40 | 3372 |
| 412970 | AB026436 | Hs.177534 | dual specificity phosphatase 10 | 4.40 | 4890 687 |
| 456508 | AA502764 | Hs.123469 | ESTs, Weakly similar to AF208855 1 BM-01 | 4.37 | 4547 |
| 451752 | AB032997 | | KIAA1171 protein | 4.37 | 4247 5750 |
| 449722 | BE280074 | Hs.23960 | cyclin B1 | 4.36 | 4079 |
| 414706 | AW340125 | Hs.76989 | KIAA0097 gene product | 4.36 | 865 |
| 427712 | AI368024 | Hs.283696 | ESTs | 4.36 | 2187 |
| 421305 | BE397354 | Hs.324830 | diptheria toxin resistance protein requi | 4.33 | 1505 |
| 429922 | Z97630 | Hs.226117 | H1 histone family, member 0 | 4.33 | 2427 5430 |
| 444172 | BE147740 | | ESTs, Moderately similar to I38022 hypot | 4.32 | 3580 |
| 429610 | AB024937 | Hs.211092 | LUNX protein; PLUNC (palate lung and nas | 4.32 | 2395 5415 |
| 453439 | AI572438 | Hs.32976 | guanine nucleotide binding protein 4 | 4.31 | 4406 |
| 407366 | AF026942 | Hs.17518 | gb: Homo sapiens cig33 mRNA, partial sequ | 4.30 | 156 |
| 402802 | | | NM_001397: Homo sapiens endothelin conver | 4.30 | 38 4707 |
| 402408 | | | NM_030920*: Homo sapiens hypothetical pro | 4.30 | 33 4703 |
| 438321 | AA576635 | Hs.6153 | CGI-48 protein | 4.29 | 3133 |
| 409435 | AI810721 | Hs.95424 | ESTs | 4.27 | 370 |
| 446440 | AV658411 | Hs.42656 | KIAA1681 protein | 4.25 | 3751 |
| 432350 | NM_005865 | Hs.274407 | protease, serine, 16 (thymus) | 4.25 | 2658 5507 |
| 419926 | AW900992 | Hs.93796 | DKFZP586D2223 protein | 4.22 | 1371 |
| 407235 | D20569 | Hs.169407 | SAC2 (suppressor of actin mutations 2, y | 4.21 | 140 |
| 432140 | AK000404 | Hs.272688 | hypothetical protein FLJ20397 | 4.20 | 2634 5500 |
| 428479 | Y00272 | Hs.334562 | cell division cycle 2, G1 to S and G2 to | 4.20 | 2264 5363 |
| 413582 | AW295647 | Hs.71331 | hypothetical protein MGC5350 | 4.20 | 736 |
| 421928 | AF013758 | Hs.109643 | polyadenylate binding protein-interactin | 4.19 | 1580 5129 |
| 428728 | NM_016625 | Hs.191381 | hypothetical protein | 4.18 | 2288 5373 |
| 424001 | W67883 | Hs.137476 | paternally expressed 10 | 4.17 | 1788 |
| 441362 | BE614410 | Hs.23044 | RAD51 (S. cerevisiae) homolog (E coli Re | 4.17 | 3347 |
| 427658 | H61387 | Hs.30868 | nogo receptor | 4.17 | 2175 |
| 450325 | AI935962 | Hs.91973 | ESTs | 4.16 | 4129 |
| 452279 | AA286844 | | hypothetical protein FLJ13164 | 4.15 | 4293 |
| 408035 | NM_006242 | Hs.42215 | protein phosphatase 1, regulatory subuni | 4.14 | 226 4787 |
| 414696 | AF002020 | Hs.76918 | Niemann-Pick disease, type C1 | 4.10 | 4924 864 |
| 422576 | BE548555 | Hs.118554 | CGI-83 protein | 4.10 | 1659 |
| 401558 | | | ENSP00000220478*: SECRETOGRANIN III. | 4.10 | |
| 431585 | BE242803 | Hs.262823 | hypothetical protein FLJ10326 | 4.10 | 2572 |
| 456977 | AK000252 | Hs.169758 | hypothetical protein FLJ20245 | 4.10 | 4572 5807 |
| 423493 | AI815965 | Hs.129683 | ubiquitin-conjugating enzyme E2D 1 (homo | 4.09 | 1753 |
| 428654 | NM_012091 | Hs.188661 | adenosine deaminase, tRNA-specific 1 | 4.07 | 2280 5370 |
| 416402 | NM_000715 | Hs.1012 | complement component 4-binding protein, | 4.05 | 4959 993 |
| 433077 | AA314262 | Hs.289008 | YDD19 protein | 4.05 | 2732 |
| 430454 | AW469011 | Hs.105635 | ESTs | 4.05 | 2487 |
| 440074 | AA863045 | Hs.10669 | ESTs, Weakly similar to T00050 hypotheti | 4.04 | 3259 |
| 433447 | U29195 | Hs.3281 | neuronal pentraxin II | 4.04 | 2764 5536 |
| 409799 | D11928 | Hs.76845 | phosphoserine phosphatase-like | 4.03 | 407 |
| 436291 | BE568452 | Hs.344037 | protein regulator of cytokinesis 1 | 4.03 | 2975 |
| 407244 | M10014 | | fibrinogen, gamma polypeptide | 4.01 | 143 4767 |
| 452256 | AK000933 | Hs.28661 | Homo sapiens cDNA FLJ10071 fis, clone HE | 4.00 | 4289 |
| 411305 | BE241596 | Hs.69547 | myelin basic protein | 3.99 | 546 |
| 418113 | AI272141 | Hs.83484 | SRY (sex determining region Y)-box 4 | 3.96 | 1161 |
| 423175 | W27595 | Hs.347310 | hypothetical protein FLJ14627 | 3.95 | 1724 |
| 433388 | AI432672 | Hs.288539 | hypothetical protein FLJ22191 | 3.93 | 2759 |
| 440006 | AK000517 | Hs.6844 | NALP2 protein; PYRIN-Containing APAF1-li | 3.91 | 3252 5601 |
| 450193 | AI916071 | Hs.15607 | Homo sapiens Fanconi anemia complementat | 3.91 | 4111 |
| 439453 | BE264974 | Hs.6566 | thyroid hormone receptor interactor 13 | 3.91 | 3208 |
| 400277 | | | Eos Control | 3.90 | |
| 416498 | U33632 | Hs.79351 | potassium channel, subfamily K, member 1 | 3.90 | 4962 999 |
| 446999 | AA151520 | | hypothetical protein MGC4485 | 3.90 | 3811 |
| 407355 | AA846203 | Hs.193974 | ESTs, Weakly similar to ALU1_HUMAN ALU S | 3.90 | 155 |
| 432201 | AI538613 | Hs.298241 | Transmembrane protease, serine 3 | 3.87 | 2643 |
| 408670 | AF160967 | Hs.46784 | potassium large conductance calcium-acti | 3.85 | 291 4803 |
| 409151 | AA306105 | Hs.50785 | SEC22, vesicle trafficking protein (S. c | 3.85 | 341 |
| 422956 | BE545072 | Hs.122579 | ECT2 protein (Epithelial cell transformi | 3.85 | 1698 |
| 426501 | AW043782 | Hs.293616 | ESTs | 3.85 | 2072 |
| 430387 | AW372884 | Hs.240770 | nuclear cap binding protein subunit 2, 2 | 3.83 | 2479 |
| 421437 | AW821252 | Hs.104336 | hypothetical protein | 3.82 | 1519 |
| 426451 | AI908165 | Hs.169946 | GATA-binding protein 3 (T-cell receptor | 3.81 | 2066 |
| 418329 | AW247430 | Hs.84152 | cystathionine-beta-synthase | 3.80 | 1186 |
| 428227 | AA321649 | Hs.2248 | small inducible cytokine subfamily B (Cy | 3.80 | 2231 |
| 404632 | | | NM_022490: Homo sapiens hypothetical prot | 3.80 | 4726 59 |
| 411704 | AI499220 | Hs.71573 | hypothetical protein FLJ10074 | 3.80 | 571 |
| 404571 | | | NM_015902*: Homo sapiens progestin induce | 3.80 | 4724 57 |
| 434834 | AF156774 | Hs.324020 | 1-acylglycerol-3-phosphate O-acyltransfe | 3.77 | 2872 5557 |
| 441553 | AA281219 | Hs.121296 | ESTs | 3.76 | 3357 |
| 407300 | AA102616 | Hs.120769 | gb: zn43e07.s1 Stratagene HeLa cell s3 93 | 3.75 | 149 |
| 411598 | BE336654 | Hs.70937 | H3 histone family, member A | 3.75 | 562 |
| 453900 | AW003582 | Hs.226414 | ESTs, Weakly similar to ALU8_HUMAN ALU S | 3.75 | 4448 |
| 418304 | AA215702 | | gb: zr97g10.r1 NCI_CGAP_GCB1 Homo sapiens | 3.75 | 1178 |
| 425842 | AI587490 | Hs.159623 | NK-2 (Drosophila) homolog B | 3.75 | 2002 |
| 405558 | | | Target Exon | 3.75 | |
| 438869 | AF075009 | | gb: Homo sapiens full length insert cDNA | 3.74 | 3171 |
| 400409 | AF153341 | | Homo sapiens winged helix/forkhead trans | 3.73 | 15 4687 |
| 432840 | AK001403 | Hs.279521 | hypothetical protein FLJ20530 | 3.72 | 2704 5516 |
| 406685 | M18728 | | gb: Human nonspecific crossreacting antig | 3.70 | 4745 83 |
| 415621 | AI648602 | Hs.55468 | ESTs | 3.70 | 938 |
| 443687 | F13040 | | KIAA1228 protein | 3.70 | 3540 |
| 421340 | F07783 | Hs.1369 | decay accelerating factor for complement | 3.70 | 1508 |
| 422440 | NM_004812 | Hs.116724 | aldo-keto reductase family 1, member B10 | 3.68 | 1647 5151 |
| 415339 | NM_015156 | Hs.78398 | KIAA0071 protein | 3.67 | 4946 927 |
| 409757 | NM_001898 | Hs.123114 | cystatin SN | 3.65 | 403 4832 |
| 420390 | AA330047 | Hs.191187 | ESTs | 3.65 | 1418 |
| 442772 | AW503680 | Hs.5957 | Homo sapiens clone 24416 mRNA sequence | 3.65 | 3468 |
| 414670 | BE409525 | Hs.902 | neurofibromin 2 (bilateral acoustic neur | 3.65 | 860 |
| 416198 | H27332 | Hs.99598 | hypothetical protein MGC5338 | 3.65 | 980 |
| 425782 | U66468 | Hs.159525 | cell growth regulatory with EF-hand doma | 3.65 | 1996 5278 |
| 417601 | NM_014735 | Hs.82292 | KIAA0215 gene product | 3.63 | 1105 4991 |
| 435854 | AJ278120 | Hs.4996 | putative ankyrin-repeat containing prote | 3.63 | 2949 5571 |
| 448826 | AI580252 | Hs.293246 | ESTs, Weakly similar to putative p150 [H | 3.62 | 4012 |
| 425242 | D13635 | Hs.155287 | KIAA0010 gene product | 3.61 | 1942 |
| 408452 | AA054683 | Hs.192455 | ESTs, Weakly similar to ALU7_HUMAN ALU S | 3.60 | 268 |
| 434808 | AF155108 | Hs.256150 | NY-REN-41 antigen | 3.60 | 2868 5554 |
| 418478 | U38945 | Hs.1174 | cyclin-dependent kinase inhibitor 2A (me | 3.60 | 1204 5017 |
| 429687 | Al675749 | Hs.211608 | nucleoporin 153 kD | 3.56 | 2406 |
| 431448 | AL137517 | Hs.306201 | hypothetical protein DKFZp564O1278 | 3.55 | 2555 5476 |
| 417378 | R57256 | Hs.82037 | TATA box binding protein (TBP)-associate | 3.55 | 1088 |
| 453160 | AI263307 | | H2B histone family, member L | 3.55 | 4380 |
| 422094 | AF129535 | Hs.272027 | F-box only protein 5 | 3.55 | 1602 5137 |
| 438118 | AW753311 | | ESTs | 3.55 | 3119 |
| 442861 | AA243837 | Hs.57787 | ESTs | 3.55 | 3475 |
| 448186 | AA262105 | Hs.4094 | Homo sapiens cDNA FLJ14208 fis, clone NT | 3.55 | 3949 |
| 432329 | NM_002962 | Hs.2960 | S100 calcium-binding protein A5 | 3.55 | 2655 5506 |
| 449318 | AW236021 | Hs.78531 | Homo sapiens, Similar to RIKEN cDNA 5730 | 3.55 | 4055 |
| 443450 | N66045 | Hs.133529 | ESTs | 3.55 | 3524 |
| 422168 | AA586894 | Hs.112408 | S100 calcium-binding protein A7 (psorias | 3.55 | 1612 |
| 409542 | AA503020 | Hs.36563 | hypothetical protein FLJ22418 | 3.54 | 382 |
| 423250 | BE061916 | Hs.125849 | chromosome 8 open reading frame 2 | 3.54 | 1732 |
| 447349 | AI375546 | | gb: tc23d04.x1 Soares_total_fetus_Nb2HF8_{—} | 3.52 | 3848 |
| 424273 | W40460 | Hs.144442 | phospholipase A2, group X | 3.52 | 1823 |
| 444735 | BE019923 | Hs.243122 | hypothetical protein FLJ13057 similar to | 3.51 | 3623 |
| 453785 | AI368236 | Hs.283732 | ESTs, Moderately similar to ALU1_HUMAN A | 3.50 | 4432 |
| 406081 | | | Target Exon | 3.50 | |
| 411096 | U80034 | Hs.68583 | mitochondrial intermediate peptidase | 3.50 | 4862 535 |
| 409902 | AI337658 | Hs.156351 | ESTs | 3.50 | 416 |
| 458621 | AI221741 | Hs.117777 | ESTs | 3.49 | 4630 |
| 435664 | AI032087 | Hs.269819 | ESTs | 3.48 | 2936 |
| 438714 | AA814859 | | ESTs | 3.46 | 3161 |
| 415947 | U04045 | Hs.78934 | mutS (E. coli) homolog 2 (colon cancer, | 3.46 | 4955 962 |
| 409731 | AA125985 | Hs.56145 | thymosin, beta, identified in neuroblast | 3.45 | 402 |
| 453941 | U39817 | Hs.36820 | Bloom syndrome | 3.45 | 4454 5790 |
| 442353 | BE379594 | Hs.49136 | ESTs, Moderately similar to ALU7_HUMAN A | 3.45 | 3423 |
| 410206 | NM_003826 | Hs.60415 | N-ethylmaleimide-sensitive factor attach | 3.45 | 454 4840 |
| 408527 | AL135018 | Hs.33074 | Homo sapiens, clone IMAGE: 3606519, mRNA, | 3.44 | 276 |
| 415079 | R43179 | Hs.22895 | hypothetical protein FLJ23548 | 3.44 | 906 |
| 420005 | AW271106 | Hs.133294 | ESTs | 3.43 | 1372 |
| 425354 | U62027 | Hs.155935 | complement component 3a receptor 1 | 3.43 | 1952 5257 |
| 442118 | AA976718 | Hs.202242 | ESTs | 3.40 | 3399 |
| 434844 | AF157116 | Hs.22350 | hypothetical protein LOC56757 | 3.40 | 2873 |
| 426931 | NM_003416 | Hs.2076 | zinc finger protein 7 (KOX 4, clone HF.1 | 3.40 | 2114 5328 |
| 415263 | AA948033 | Hs.130853 | ESTs | 3.40 | 920 |
| 412863 | AA121673 | Hs.59757 | zinc finger protein 281 | 3.40 | 679 |
| 454453 | AW752781 | | hypothetical protein FLJ12614 similar to | 3.38 | 4485 |
| 441128 | AA570256 | | ESTs, Weakly similar to T23273 hypotheti | 3.38 | 3334 |
| 422938 | NM_001809 | Hs.1594 | centromere protein A (17 kD) | 3.38 | 1694 5162 |
| 443180 | R15875 | Hs.258576 | claudin 12 | 3.37 | 3504 |
| 428839 | AI767756 | Hs.82302 | Homo sapiens cDNA FLJ14814 fis, clone NT | 3.37 | 2310 |
| 411605 | AW006831 | | ESTs | 3.37 | 563 |
| 413719 | BE439580 | Hs.75498 | small inducible cytokine subfamily A (Cy | 3.36 | 749 |
| 444371 | BE540274 | Hs.239 | forkhead box M1 | 3.35 | 3592 |
| 430188 | AL049242 | Hs.234794 | Homo sapiens mRNA; cDNA DKFZp564B083 (fr | 3.35 | 2453 |
| 408101 | AW968504 | Hs.123073 | CDC2-related protein kinase 7 | 3.35 | 234 |
| 425769 | U72513 | Hs.159486 | Human RPL13-2 pseudogene mRNA, complete | 3.35 | 1995 |
| 451806 | NM_003729 | Hs.27076 | RNA 3'-terminal phosphate cyclase | 3.35 | 4248 5751 |
| 410166 | AK001376 | Hs.59346 | hypothetical protein FLJ10514 | 3.35 | 451 4839 |
| 442326 | H92962 | Hs.124813 | hypothetical protein MGC14817 | 3.35 | 3417 |
| 442660 | AW138174 | Hs.130651 | ESTs | 3.35 | 3458 |
| 446054 | AB014537 | Hs.13604 | KIAA0637 gene product | 3.34 | 3722 5664 |
| 427581 | NM_014788 | Hs.179703 | KIAA0129 gene product | 3.33 | 2167 5339 |
| 433556 | W56321 | Hs.111460 | calcium/calmodulin-dependent protein kin | 3.33 | 2768 |
| 448552 | AW973653 | Hs.20104 | hypothetical protein FLJ00052 | 3.33 | 3983 |
| 434203 | BE262677 | Hs.283558 | hypothetical protein PRO1855 | 3.33 | 2820 |
| 402496 | | | Target Exon | 3.32 | |
| 432169 | Y00971 | Hs.2910 | phosphoribosyl pyrophosphate synthetase | 3.30 | 2637 5501 |
| 410174 | AA306007 | Hs.59461 | DKFZP434C245 protein | 3.30 | 453 |
| 424332 | AA338919 | Hs.101615 | ESTs | 3.30 | 1830 |
| 412530 | AA766268 | Hs.266273 | hypothetical protein FLJ13346 | 3.30 | 643 |
| 425018 | BE245277 | Hs.154196 | E4F transcription factor 1 | 3.30 | 1912 |
| 430187 | AI799909 | Hs.158989 | ESTs | 3.30 | 2452 |
| 440138 | AB033023 | Hs.318127 | hypothetical protein FLJ10201 | 3.30 | 3267 5603 |
| 444743 | AA045648 | Hs.301957 | nudix (nucleoside diphosphate linked moi | 3.30 | 3624 |
| 415992 | C05837 | Hs.145807 | hypothetical protein FLJ13593 | 3.30 | 964 |
| 400297 | AI127076 | Hs.306201 | hypothetical protein DKFZp564O1278 | 3.29 | 9 |
| 442108 | AW452649 | Hs.166314 | ESTs | 3.28 | 3398 |
| 410762 | AF226053 | Hs.66170 | HSKM-B protein | 3.26 | 4857 514 |
| 420552 | AK000492 | Hs.98806 | hypothetical protein | 3.25 | 1430 5081 |
| 442152 | R39246 | Hs.239666 | Homo sapiens cDNA FLJ13495 fis, clone PL | 3.25 | 3401 |
| 422420 | U03398 | Hs.1524 | tumor necrosis factor (ligand) superfami | 3.25 | 1643 5150 |
| 435532 | AW291488 | Hs.117305 | Homo sapiens, clone IMAGE: 3682908, mRNA | 3.25 | 2923 |
| 436643 | AA757626 | Hs.10941 | ESTs, Weakly similar to IPP1_HUMAN PROTE | 3.25 | 2999 |
| 433183 | AF231338 | Hs.222024 | transcription factor BMAL2 | 3.25 | 2745 5531 |
| 427521 | AW973352 | | ESTs | 3.25 | 2159 |
| 411945 | AL033527 | Hs.92137 | L-myc-2 protein (MYCL2) | 3.25 | 4870 590 |
| 444381 | BE387335 | Hs.283713 | hypothetical protein BC014245 | 3.24 | 3593 |
| 430335 | D80007 | Hs.239499 | KIAA0185 protein | 3.24 | 2473 5448 |
| 438525 | AW368528 | Hs.100855 | ESTs | 3.24 | 3145 |
| 400247 | | | Eos Control | 3.23 | |
| 427621 | BE621182 | Hs.179882 | hypothetical protein FLJ12443 | 3.22 | 2173 |
| 418338 | NM_002522 | Hs.84154 | neuronal pentraxin I | 3.21 | 1189 5010 |
| 448686 | AA158659 | Hs.334712 | hypothetical protein FLJ14744 | 3.20 | 3997 |
| 450728 | AW162923 | Hs.25363 | presenilin 2 (Alzheimer disease 4) | 3.20 | 4156 |
| 426581 | AB040956 | Hs.135890 | KIAA1523 protein | 3.20 | 2080 5311 |
| 442179 | AA983842 | Hs.333555 | chromosome 2 open reading frame 2 | 3.20 | 3404 |
| 422536 | AA311915 | Hs.187726 | gb: EST182621 Jurkat T-cells VI Homo sapi | 3.20 | 1654 |
| 449704 | AK000733 | Hs.23900 | GTPase activating protein | 3.20 | 4076 5722 |
| 448595 | AB014544 | Hs.21572 | KIAA0644 gene product | 3.20 | 3987 5711 |
| 442592 | BE566623 | Hs.29899 | ESTs, Weakly similar to G02075 transcrip | 3.19 | 3450 |
| 452994 | AW962597 | Hs.31305 | KIAA1547 protein | 3.19 | 4363 |
| 426699 | AA383337 | Hs.121269 | ESTs | 3.18 | 2089 |
| 427719 | AI393122 | Hs.134726 | ESTs | 3.17 | 2189 |
| 418836 | AI655499 | Hs.161712 | BMP-R1B | 3.17 | 1247 |
| 410619 | BE512730 | Hs.65114 | keratin 18 | 3.16 | 498 |
| 414271 | AK000275 | Hs.75871 | protein kinase C binding protein 1 | 3.15 | 807 |
| 452833 | BE559681 | Hs.30736 | KIAA0124 protein | 3.15 | 4351 |
| 452827 | AI571835 | Hs.55468 | ESTs | 3.14 | 4350 |
| 430462 | AI584156 | Hs.105640 | Homo sapiens, clone IMAGE: 4139775, mRNA, | 3.14 | 2488 |
| 449145 | AI632122 | Hs.198408 | ESTs | 3.14 | 4039 |
| 453902 | BE502341 | Hs.3402 | ESTs | 3.13 | 4449 |
| 420982 | AW576160 | Hs.100729 | KIAA0692 protein | 3.13 | 1471 |
| 425529 | NM_014656 | Hs.158282 | KIAA0040 gene product | 3.13 | 1975 5270 |
| 430289 | AK001952 | Hs.238039 | hypothetical protein FLJ11090 | 3.13 | 2461 5440 |
| 413413 | D82520 | | zinc finger protein 36 (KOX 18) | 3.11 | 717 |
| 432728 | NM_006979 | Hs.278721 | HLA class II region expressed gene KE4 | 3.10 | 2694 5512 |
| 420090 | AA220238 | Hs.94986 | ribonuclease P (38 kD) | 3.10 | 1383 |
| 446715 | AI337735 | Hs.173919 | ESTs, Moderately similar to ZN91_HUMAN Z | 3.10 | 3778 |
| 424539 | L02911 | Hs.150402 | Activin A receptor, type I (ACVR1) (ALK | 3.10 | 1857 5216 |
| 443054 | AI745185 | Hs.84520 | yes-associated protein 65 kDa | 3.10 | 3491 |
| 425641 | D79758 | Hs.14355 | Homo sapiens cDNA FLJ13207 fis, clone NT | 3.10 | 1981 |
| 423642 | AW452650 | Hs.157148 | hypothetical protein MGC13204 | 3.10 | 1763 |
| 422005 | BE266556 | Hs.110702 | Homo sapiens mRNA; cDNA DKFZp761E212 (fr | 3.10 | 1592 |
| 426108 | AA622037 | Hs.166468 | programmed cell death 5 | 3.08 | 2028 |
| 415632 | U67085 | Hs.78524 | TcD37 homolog | 3.08 | 4950 939 |
| 426227 | U67058 | Hs.154299 | Human proteinase activated receptor-2 mR | 3.07 | 2041 |
| 425649 | U30930 | Hs.158540 | UDP glycosyltransferase 8 (UDP-galactose | 3.07 | 1982 5273 |
| 447541 | AK000288 | Hs.18800 | hypothetical protein FLJ20281 | 3.07 | 3877 5691 |
| 433323 | AA805132 | Hs.159142 | ESTs | 3.07 | 2755 |
| 420522 | AW957137 | Hs.98541 | hypothetical protein | 3.07 | 1427 |
| 450256 | AA286887 | Hs.24724 | MFH-amplified sequences with leucine-ric | 3.06 | 4120 |
| 429978 | AA249027 | | ribosomal protein S6 | 3.06 | 2433 |
| 403011 | | | ENSP00000215330*: Probable serine/threoni | 3.05 | |
| 401203 | | | Target Exon | 3.05 | |
| 417975 | AA641836 | Hs.30085 | hypothetical protein FLJ23186 | 3.05 | 1143 |
| 410507 | AA355288 | | transitional epithelia response protein | 3.05 | 486 |
| 404440 | | | NM_021048: Homo sapiens melanoma antigen, | 3.05 | 4721 54 |
| 419865 | NM_007020 | Hs.93502 | U1-snRNP binding protein homolog (70 kD) | 3.05 | 1364 5058 |
| 410561 | BE540255 | Hs.6994 | Homo sapiens cDNA: FLJ22044 fis, clone H | 3.05 | 493 |
| 430066 | AI929659 | Hs.237825 | signal recognition particle 72 kD | 3.05 | 2442 |
| 425322 | U63630 | Hs.155637 | protein kinase, DNA-activated, catalytic | 3.05 | 1950 5255 |
| 412715 | NM_000947 | Hs.74519 | primase, polypeptide 2A (58 kD) | 3.04 | 4885 662 |
| 442530 | AI580830 | Hs.176508 | Homo sapiens cDNA FLJ14712 fis, clone NT | 3.04 | 3437 |
| 406690 | M29540 | Hs.220529 | carcinoembryonic antigen-related cell ad | 3.03 | 4748 86 |
| 424163 | NM_007071 | Hs.142245 | HERV-H LTR-associating 3 | 3.03 | 1811 5201 |
| 450447 | AF212223 | Hs.25010 | hypothetical protein P15-2 | 3.03 | 4139 5730 |
| 447444 | AK000318 | Hs.18616 | hypothetical protein FLJ20311 | 3.02 | 3862 5689 |
| 429903 | AL134197 | Hs.93597 | cyclin-dependent kinase 5, regulatory su | 3.02 | 2425 |
| 435472 | AW972330 | Hs.283022 | triggering receptor expressed on myeloid | 3.01 | 2917 |
| 426572 | AB037783 | Hs.170623 | hypothetical protein FLJ11183 | 3.00 | 2079 5310 |
| 426215 | AW963419 | Hs.155223 | stanniocalcin 2 | 3.00 | 2039 |
| 441102 | AA973905 | | intermediate filament protein syncoilin | 3.00 | 3333 |
| 444165 | AL137443 | Hs.10441 | hypothetical protein FLJ11236 | 3.00 | 3579 |
| 425673 | R70318 | Hs.339730 | ESTs | 3.00 | 1985 |
| 442619 | AA447492 | Hs.20183 | ESTs, Weakly similar to AF164793 1 prote | 3.00 | 3455 |
| 413832 | AI913647 | Hs.131886 | Homo sapiens cDNA: FLJ22113 fis, clone H | 3.00 | 755 |
| 421515 | Y11339 | Hs.105352 | GalNAc alpha-2,6-sialyltransferase I, I | 3.00 | 1532 5113 |
| 420610 | AI683183 | Hs.99348 | distal-less homeo box 5 | 3.00 | 1437 |
| 401435 | | | C14000397*: gi\|7499898\|pir∥T33295 hypoth | 3.00 | 26 |
| 422771 | NM_012318 | Hs.120165 | leucine zipper-EF-hand containing transm | 3.00 | 1681 5158 |
| 454293 | H49739 | Hs.134013 | ESTs, Moderately similar to HK61_HUMAN H | 2.99 | 4475 |
| 425465 | L18964 | Hs.1904 | protein kinase C, iota | 2.98 | 1969 5266 |
| 429183 | AB014604 | Hs.197955 | KIAA0704 protein | 2.97 | 2337 5393 |
| 448789 | BE539108 | Hs.22051 | hypothetical protein MGC15548 | 2.97 | 4007 |
| 429084 | AJ001443 | Hs.195614 | splicing factor 3b, subunit 3, 130 kD | 2.97 | 2332 5390 |
| 431197 | AL038596 | Hs.250745 | polymerase (RNA) III (DNA directed) (62 k | 2.96 | 2539 |
| 436167 | AA705651 | Hs.25087 | ESTs | 2.96 | 2965 |
| 418203 | X54942 | Hs.83758 | CDC28 protein kinase 2 | 2.96 | 1169 5003 |
| 451071 | AW138807 | Hs.204939 | ESTs, Highly similar to A54677 homeotic | 2.95 | 4189 |
| 420362 | U79734 | Hs.97206 | huntingtin interacting protein 1 | 2.95 | 1417 5075 |
| 442875 | BE623003 | Hs.23625 | Homo sapiens clone TCCCTA00142 mRNA sequ | 2.95 | 3477 |
| 437389 | AL359587 | Hs.271586 | hypothetical protein DKFZp762M115 | 2.94 | 3063 5586 |
| 418941 | AA452970 | Hs.239527 | E1B-55 kDa-associated protein 5 | 2.94 | 1260 |
| 439375 | AA689526 | Hs.344249 | steroid dehydrogenase homolog | 2.94 | 3204 |
| 411975 | AI916058 | Hs.144583 | 3′UTR of: dead ringer (Drosophila)-like | 2.93 | 596 |
| 439574 | AI469788 | | ESTs | 2.93 | 3219 |
| 417348 | AI940507 | Hs.318526 | hypothetical protein FLJ12661 | 2.93 | 1084 |
| 447155 | AA100605 | Hs.121557 | ESTs, Weakly similar to DP1_HUMAN POLYPO | 2.93 | 3827 |
| 420956 | AA351584 | Hs.100543 | Homo sapiens clone 24505 mRNA sequence | 2.92 | 1468 |
| 419705 | AW368634 | Hs.154331 | ESTs | 2.92 | 1351 |
| 425159 | NM_004341 | Hs.154868 | carbamoyl-phosphate synthetase 2, aspart | 2.92 | 1931 5249 |
| 416902 | AA375634 | Hs.288974 | hypothetical protein FLJ12528 | 2.91 | 1035 |
| 407242 | M18728 | | gb: Human nonspecific crossreacting antig | 2.91 | 142 4766 |
| 446880 | AI811807 | Hs.108646 | Homo sapiens cDNA FLJ14934 fis, clone PL | 2.91 | 3799 |
| 406581 | | | Target Exon | 2.90 | |
| 404607 | | | Target Exon | 2.90 | |
| 401093 | | | C12000586*: gi\|6330167\|dbj\|BAA86477.1\| (A | 2.90 | |
| 421247 | BE391727 | Hs.102910 | general transcription factor IIH, polype | 2.90 | 1495 |
| 405366 | | | NM_003371*: Homo sapiens vav 2 oncogene ( | 2.90 | 4735 69 |
| 418700 | AI963808 | Hs.86970 | ESTs, Moderately similar to ALU5_HUMAN A | 2.90 | 1230 |
| 417288 | AI984792 | Hs.108812 | hypothetical protein FLJ22004 | 2.90 | 1077 |
| 419752 | AA249573 | Hs.152618 | ESTs, Moderately similar to ZN91_HUMAN Z | 2.90 | 1358 |
| 450375 | AA009647 | | a disintegrin and metalloproteinase doma | 2.90 | 4133 |
| 419497 | NM_006410 | Hs.90753 | Tat-interacting protein (30 kD) | 2.90 | 1320 5050 |
| 423849 | AL157425 | Hs.133315 | Homo sapiens mRNA; cDNA DKFZp761J1324 (f | 2.90 | 1780 |
| 452909 | NM_015368 | Hs.30985 | pannexin 1 | 2.90 | 4358 5767 |
| 430294 | AI538226 | Hs.32976 | guanine nucleotide binding protein 4 | 2.90 | 2463 |
| 414004 | AA737033 | Hs.7155 | similar to thymidylate kinase family LPS | 2.89 | 772 |
| 439680 | AW245741 | Hs.58461 | ESTs, Weakly similar to A35659 krueppel- | 2.89 | 3229 |
| 432908 | AI861896 | | ESTs | 2.89 | 2711 |
| 408296 | AL117452 | Hs.44155 | DKFZP586G1517 protein | 2.88 | 252 4792 |
| 450065 | AL050107 | Hs.24341 | transcriptional co-activator with PDZ-bi | 2.88 | 4102 5725 |
| 431770 | BE221880 | Hs.268555 | 5′-3′ exoribonuclease 2 | 2.87 | 2596 |
| 431933 | AI187057 | Hs.132554 | ESTs | 2.87 | 2618 |
| 424954 | NM_000546 | Hs.1846 | tumor protein p53 (Li-Fraumeni syndrome) | 2.87 | 1901 5238 |
| 423771 | AF053004 | Hs.132781 | class I cytokine receptor | 2.87 | 1773 5186 |
| 449976 | H06350 | Hs.135056 | Human DNA sequence from clone RP5-850E9 | 2.87 | 4095 |
| 410442 | X73424 | Hs.63788 | propionyl Coenzyme A carboxylase, beta p | 2.87 | 479 4848 |
| 423165 | AI937547 | Hs.124915 | hypothetical protein MGC2601 | 2.87 | 1722 |
| 445704 | AI493742 | Hs.167700 | ESTs, Moderately similar to I38022 hypot | 2.86 | 3694 |
| 407198 | H91679 | | gb: yv04a07.s1 Soares fetal liver spleen | 2.86 | 135 |
| 412942 | AL120344 | Hs.75074 | mitogen-activated protein kinase-activat | 2.85 | 685 |
| 432229 | AW290976 | Hs.143587 | ESTs | 2.85 | 2646 |
| 430452 | AI888450 | Hs.174644 | hypothetical protein FLJ21669 | 2.85 | 2486 |
| 422805 | AA436989 | Hs.121017 | H2A histone family, member A | 2.85 | 1683 |
| 443614 | AV655386 | Hs.7645 | fibrinogen, B beta polypeptide | 2.85 | 3532 |
| 429370 | C19097 | Hs.89709 | glutamate-cysteine ligase, modifier subu | 2.85 | 2361 |
| 428829 | R14050 | Hs.194051 | Homo sapiens mRNA; cDNA DKFZp566B213 (fr | 2.84 | 2306 |
| 411285 | AI733766 | Hs.69429 | Homo sapiens IMAGE: 512024 clone, mRNA | 2.84 | 545 |
| 415402 | AA164687 | Hs.177576 | mannosyl (alpha-1,3-)-glycoprotein beta- | 2.84 | 930 |
| 414821 | M63835 | Hs.77424 | Fc fragment of IgG, high affinity la, re | 2.83 | 4929 881 |
| 446595 | T57448 | Hs.15467 | hypothetical protein FLJ20725 | 2.83 | 3768 |
| 442643 | U82756 | | PRP4/STK/WD splicing factor | 2.83 | 3457 5623 |
| 428438 | NM_001955 | Hs.2271 | endothelin 1 | 2.82 | 2257 5358 |
| 441024 | AW081530 | Hs.268231 | ESTs | 2.82 | 3327 |
| 453005 | AW055308 | Hs.31803 | ESTs, Weakly similar to N-WASP [H. sapien | 2.82 | 4365 |
| 420851 | AA281062 | Hs.29493 | hypothetical protein FLJ20142 | 2.82 | 1460 |
| 412482 | AI499930 | Hs.334885 | mitochondrial GTP binding protein | 2.81 | 636 |
| 408633 | AW963372 | Hs.46677 | PRO2000 protein | 2.81 | 286 |
| 421077 | AK000061 | Hs.101590 | hypothetical protein | 2.81 | 1479 5093 |
| 433730 | AK002135 | Hs.3542 | hypothetical protein FLJ11273 | 2.81 | 2783 5540 |
| 433867 | AK000596 | Hs.3618 | hippocalcin-like 1 | 2.81 | 2794 |
| 433701 | AW445023 | Hs.15155 | ESTs | 2.81 | 2782 |
| 425849 | AJ000512 | Hs.296323 | serum/glucocorticoid regulated kinase | 2.81 | 2005 5279 |
| 433285 | AW975944 | Hs.237396 | ESTs | 2.81 | 2753 |
| 407634 | AW016569 | Hs.136414 | UDP-GlcNAc: betaGal beta-1,3-N-acetylgluc | 2.81 | 174 |
| 457819 | AA057484 | Hs.35406 | FLJ20522 Hypothetical protein FLJ20522 | 2.81 | 4601 |
| 426925 | NM_001196 | Hs.315689 | Homo sapiens cDNA: FLJ22373 fis, clone H | 2.80 | 2112 5326 |
| 416406 | D86961 | Hs.79299 | lipoma HMGIC fusion partner-like 2 | 2.80 | 4960 994 |
| 419544 | AI909154 | | gb: QV-BT200-010499-007 BT200 Homo sapien | 2.80 | 1329 |
| 428134 | AA421773 | Hs.161008 | ESTs | 2.80 | 2221 |
| 436211 | AK001581 | Hs.334828 | hypothetical protein FLJ10719; KIAA1794 | 2.80 | 2967 5576 |
| 432006 | AL137382 | Hs.272320 | Homo sapiens mRNA; cDNA DKFZp434L1226 (f | 2.80 | 2626 |
| 428758 | AA433988 | Hs.98502 | CA125 antigen; mucin 16 | 2.80 | 2292 |
| 422358 | AL133030 | Hs.115429 | Homo sapiens mRNA for KIAA1666 protein, | 2.79 | 1635 5149 |
| 452834 | AI638627 | Hs.105685 | KIAA1688 protein | 2.78 | 4352 |
| 411908 | L27943 | Hs.72924 | cytidine deaminase | 2.78 | 4869 585 |
| 453968 | AA847843 | Hs.62711 | High mobility group (nonhistone chromoso | 2.77 | 4456 |
| 431865 | AA521106 | Hs.136375 | ESTs, Weakly similar to S65824 reverse t | 2.77 | 2610 |
| 435937 | AA830893 | Hs.119769 | ESTs | 2.77 | 2953 |
| 434263 | N34895 | Hs.79187 | ESTs | 2.76 | 2825 |
| 434067 | H18913 | Hs.124023 | Homo sapiens cDNA FLJ14218 fis, clone NT | 2.75 | 2812 |
| 415451 | H19415 | Hs.268720 | ESTs, Moderately similar to ALU1_HUMAN A | 2.75 | 933 |
| 444185 | AW298350 | Hs.113602 | ESTs | 2.75 | 3582 |
| 445873 | AA250970 | Hs.251946 | poty(A)-binding protein, cytoplasmic 1-I | 2.75 | 3707 |
| 411630 | U42349 | Hs.71119 | Putative prostate cancer tumor suppresso | 2.75 | 4866 565 |
| 453775 | NM_002916 | Hs.35120 | replication factor C (activator 1) 4 (37 | 2.75 | 4431 5783 |
| 407771 | AL138272 | Hs.1600 | ESTs | 2.75 | 193 |
| 423492 | AF020761 | Hs.129683 | ubiquitin-conjugating enzyme E2D 1 (homo | 2.75 | 1752 |
| 413063 | AL035737 | Hs.75184 | chitinase 3-like 1 (cartilage glycoprote | 2.74 | 692 |
| 431130 | NM_006103 | Hs.2719 | HE4; epididymis-specific, whey-acidic pr | 2.74 | 2533 5470 |
| 421654 | AW163267 | Hs.106469 | suppressor of var1 (S. cerevisiae) 3-like | 2.74 | 1550 |
| 409430 | R21945 | Hs.346735 | splicing factor, arginine/serine-rich 5 | 2.74 | 369 |
| 438533 | AI440266 | Hs.170673 | ESTs, Weakly similar to T24832 hypotheti | 2.74 | 3146 |
| 443209 | AI040125 | Hs.150521 | ESTs | 2.73 | 3508 |
| 409439 | AW390511 | Hs.288862 | Homo sapiens cDNA: FLJ21260 fis, clone C | 2.73 | 371 |
| 424511 | BE300512 | Hs.193557 | ESTs, Moderately similar to ALU7_HUMAN A | 2.73 | 1854 |
| 443162 | T49951 | Hs.9029 | DKFZP434G032 protein | 2.73 | 3500 |
| 455601 | AI368680 | Hs.816 | SRY (sex determining region Y)-box 2 | 2.73 | 4515 |
| 455286 | BE144384 | | gb: MR0-HT0166-191199-004-c11 HT0166 Homo | 2.73 | 4504 |
| 453751 | R36762 | Hs.101282 | Homo sapiens cDNA: FLJ21238 fis, clone C | 2.73 | 4428 |
| 424308 | AW975531 | Hs.154443 | minichromosome maintenance deficient (S. | 2.73 | 1827 |
| 422963 | M79141 | Hs.13234 | sphingosine 1-phosphate phosphohydrolase | 2.72 | 1701 |
| 426174 | AA547959 | Hs.115838 | Homo sapiens similar to Echinoidin (LOC1 | 2.72 | 2036 |
| 439210 | AA641928 | Hs.194071 | ESTs, Weakly similar to unnamed protein | 2.72 | 3192 |
| 410082 | AA081594 | Hs.158311 | Musashi (Drosophila) homolog 1 | 2.71 | 442 |
| 417454 | NM_000202 | Hs.172458 | iduronate 2-sulfatase (Hunter syndrome) | 2.71 | 1097 4986 |
| 427083 | NM_006363 | Hs.173497 | Sec23 (S. cerevisiae) homolog B | 2.71 | 2124 5330 |
| 448877 | AI583696 | Hs.253313 | ESTs | 2.70 | 4016 |
| 400240 | | | Eon Control | 2.70 | |
| 430881 | NM_000809 | Hs.248112 | gamma-aminobutyric acid (GABA) A recepto | 2.70 | 2520 5465 |
| 443323 | BE560621 | Hs.9222 | estrogen receptor binding site associate | 2.70 | 3518 |
| 432188 | AI362952 | Hs.2928 | solute carrier family 7 (cationic amino | 2.70 | 2641 |
| 455290 | U75810 | | gb: HSU75810 Human Homo sapiens cDNA clon | 2.70 | 4505 |
| 429782 | NM_005754 | Hs.220689 | Ras-GTPase-activating protein SH3-domain | 2.70 | 2416 5425 |
| 456759 | BE259150 | Hs.127792 | delta (Drosophila)-like 3 | 2.70 | 4560 |
| 428816 | AA004986 | Hs.193852 | ATP-binding cassette, sub-family C (CFTR | 2.70 | 2303 |
| 406625 | Y13647 | Hs.119597 | stearoyl-CoA desaturase (delta-9-desatur | 2.70 | 4744 79 |
| 425236 | AW067800 | Hs.155223 | stanniocalcin 2 | 2.69 | 1941 |
| 429048 | AI372949 | Hs.44241 | Homo sapiens cDNA: FLJ21447 fis, clone C | 2.69 | 2329 |
| 404819 | | | NM_002688*: Homo sapiens peanut (Drosophi | 2.68 | 4728 62 |
| 423645 | AI215632 | Hs.147487 | ESTs | 2.68 | 1764 |
| 440327 | R12581 | Hs.191146 | ESTs | 2.67 | 3282 |
| 426746 | J03626 | Hs.2057 | uridine monophosphate synthetase (orotat | 2.67 | 2092 5317 |
| 422283 | AW411307 | Hs.114311 | CDC45 (cell division cycle 45, S. cerevis | 2.67 | 1626 |
| 400880 | | | NM_000611*: Homo sapiens CD59 antigen p18 | 2.66 | 23 4694 |
| 420440 | NM_002407 | Hs.97644 | mammaglobin 2 | 2.66 | 1422 5076 |
| 452099 | BE612992 | Hs.27931 | hypothetical protein FLJ10607 similar to | 2.66 | 4270 |
| 413431 | AW246428 | Hs.75355 | ubiquitin-conjugating enzyme E2N (homolo | 2.66 | 720 |
| 459672 | Z18867 | Hs.326843 | gb: HSDHEGC03 Stratagene cDNA library Hum | 2.65 | 4676 |
| 447805 | AW627932 | Hs.302421 | gemin4 | 2.65 | 3908 |
| 429277 | AW452016 | Hs.127863 | ESTs, Weakly similar to SFR4_HUMAN SPLIC | 2.65 | 2347 |
| 447673 | AI823987 | Hs.182285 | ESTs | 2.65 | 3889 |
| 420210 | AI557257 | Hs.44811 | ESTs | 2.65 | 1395 |
| 449570 | AA001793 | | gb: zh86c06.r1 Soares_fetal_liver_spleen_{—} | 2.65 | 4068 |
| 453878 | AW964440 | Hs.19025 | DC32 | 2.65 | 4442 |
| 436488 | BE620909 | Hs.261023 | hypothetical protein FLJ20958 | 2.65 | 2989 |
| 442275 | AW449467 | Hs.54795 | Homo sapiens secretoglobin, family 3A, m | 2.64 | 3409 |
| 446839 | BE091926 | Hs.16244 | mitotic spindle coiled-coil related prot | 2.64 | 3794 |
| 413278 | BE563085 | Hs.833 | interferon-stimulated protein, 15 kDa | 2.64 | 705 |
| 439235 | AA188827 | Hs.7988 | ESTs, Weakly similar to I38022 hypotheti | 2.64 | 354 |
| 412673 | AL042957 | Hs.31845 | ESTs | 2.64 | 659 |
| 446258 | AI283476 | Hs.263478 | ESTs | 2.64 | 3740 |
| 439211 | AI890347 | Hs.271923 | Homo sapiens cDNA: FLJ22785 fis, clone K | 2.64 | 3193 |
| 415323 | BE269352 | Hs.949 | neutrophil cytosolic factor 2 (65 kD, chr | 2.63 | 926 |
| 409703 | NM_006187 | Hs.56009 | 2′-5′-oligoadenylate synthetase 3 (100 k | 2.63 | 396 4831 |
| 410305 | AF030409 | Hs.62185 | solute carrier family 9 (sodium/hydrogen | 2.63 | 463 4843 |
| 423081 | AF262992 | Hs.123159 | sperm associated antigen 4 | 2.62 | 1717 5167 |
| 458981 | AW968318 | Hs.285996 | hypothetical protein FLJ23375 | 2.62 | 4648 |
| 434540 | NM_016045 | Hs.3945 | CGI-107 protein | 2.60 | 2847 5549 |
| 411190 | AA306342 | Hs.69171 | protein kinase C-like 2 | 2.60 | 539 |
| 453392 | U23752 | Hs.32964 | SRY (sex determining region Y)-box 11 | 2.60 | 4403 5776 |
| 436027 | AI864053 | Hs.39972 | GM2 ganglioside activator protein (GM2A) | 2.60 | 2956 |
| 433906 | AI167816 | Hs.43355 | ESTs | 2.60 | 2796 |
| 415857 | AA866115 | Hs.127797 | Homo sapiens cDNA FLJ11381 fis, clone HE | 2.60 | 956 |
| 432723 | D29677 | Hs.3085 | KIAA0054 gene product; Helicase | 2.60 | 2693 |
| 408031 | AA081395 | Hs.42173 | Homo sapiens cDNA FLJ10366 fis, clone NT | 2.60 | 225 |
| 448663 | BE614599 | | hypothetical protein MGC14797 | 2.60 | 3993 |
| 427700 | AA262294 | Hs.180383 | dual specificity phosphatase 6 | 2.60 | 2185 |
| 437478 | AL390172 | Hs.317432 | branched chain aminotransferase 1, cytos | 2.60 | 3067 |
| 426514 | BE616633 | Hs.170195 | bone morphogenetic protein 7 (osteogenic | 2.60 | 2073 |
| 434826 | AF155661 | Hs.22265 | pyruvate dehydrogenase phosphatase | 2.60 | 2871 5556 |
| 442711 | AF151073 | Hs.8645 | hypothetical protein | 2.59 | 3460 5625 |
| 401197 | | | ENSP00000229263*: HSPC213. | 2.59 | |
| 420802 | U22376 | Hs.1334 | v-myb avian myeloblastosis viral oncogen | 2.59 | 1455 5087 |
| 437967 | BE277414 | Hs.5947 | mel transforming oncogene (derived from | 2.59 | 3112 |
| 411423 | AW845987 | Hs.68864 | ESTs, Weakly similar to phosphatidylseri | 2.58 | 555 |
| 409262 | AK000631 | Hs.52256 | hypothetical protein FLJ20624 | 2.58 | 355 4819 |
| 433009 | AA761668 | | gb: nz24c08.s1 NCI_CGAP_GCB1 Homo sapiens | 2.58 | 2721 |
| 423309 | BE006775 | Hs.126782 | sushi-repeat protein | 2.58 | 1736 |
| 429950 | AW081608 | Hs.105053 | ESTs | 2.58 | 2430 |
| 447334 | AA515032 | Hs.91109 | ESTs | 2.57 | 3844 |
| 412935 | BE267045 | Hs.75064 | tubulin-specific chaperone c | 2.57 | 683 |
| 412123 | BE251328 | Hs.73291 | hypothetical protein FLJ10881 | 2.57 | 610 |
| 421307 | B2539976 | Hs.103305 | Homo sapiens mRNA; cDNA DKFZp434B0425 (f | 2.57 | 1506 |
| 450671 | AI356967 | Hs.43086 | ESTs, Weakly similar to A46010 X-linked | 2.56 | 4147 |
| 451418 | BE387790 | Hs.26369 | hypothetical protein FLJ20287 | 2.56 | 4221 |
| 428450 | NM_014791 | Hs.184339 | KIAA0175 gene product | 2.55 | 2259 5359 |
| 412141 | AI183838 | Hs.48938 | hypothetical protein FLJ21802 | 2.55 | 614 |
| 404580 | | | trichorhinophalangeal syndrome I gene (T | 2.55 | |
| 444461 | R53734 | Hs.25978 | ESTs, Weakly similar to 2109260A B cell | 2.55 | 3600 |
| 428264 | AA424839 | Hs.98484 | ESTs, Weakly similar to ALU1_HUMAN ALU S | 2.55 | 2234 |
| 413374 | NM_001034 | Hs.75319 | ribonucleotide reductase M2 polypeptide | 2.55 | 4899 713 |
| 436009 | H57130 | Hs.120925 | ESTs | 2.55 | 2955 |
| 421433 | AI829192 | Hs.22380 | ESTs | 2.55 | 1518 |
| 441224 | AU076964 | Hs.7753 | calumenin | 2.54 | 3338 |
| 447197 | R36075 | | gb: yh88b01.s1 Soares placenta Nb2HP Homo | 2.54 | 3828 |
| 457579 | AB030816 | Hs.36761 | HRAS-like suppressor | 2.54 | 4595 5813 |
| 410660 | AI061118 | Hs.65328 | Fanconi anemia, complementation group F | 2.54 | 502 |
| 447064 | AB002350 | Hs.17262 | KIAA0352 gene product | 2.54 | 3816 5680 |
| 419507 | AW170425 | Hs.87680 | ESTs | 2.53 | 1322 |
| 422095 | AI868872 | Hs.282804 | hypothetical protein FLJ22704 | 2.53 | 1603 |
| 449845 | AW971183 | Hs.6019 | DnaJ (Hsp40) homolog, subfamily C, membe | 2.53 | 4088 |
| 443426 | AF098158 | Hs.9329 | chromosome 20 open reading frame 1 | 2.53 | 3523 5627 |
| 440273 | AI805392 | Hs.325335 | Homo sapiens cDNA: FLJ23523 fis, clone L | 2.53 | 3274 |
| 440340 | AW895503 | Hs.125276 | ESTs | 2.53 | 3284 |
| 418867 | D31771 | Hs.89404 | msh (Drosophila) homeo box homolog 2 | 2.53 | 1252 5032 |
| 428484 | AF104032 | Hs.184601 | solute carrier family 7 (cationic amino | 2.53 | 2265 5364 |
| 432586 | AA568548 | | ESTs | 2.53 | 2681 |
| 406922 | S70284 | Hs.119597 | gb: stearoyl-CoA desaturase [human, adipo | 2.52 | 109 4755 |
| 424581 | M62062 | Hs.150917 | catenin (cadherin-associated protein), a | 2.52 | 1861 |
| 408393 | AW015318 | Hs.23165 | ESTs | 2.52 | 263 |
| 408949 | AF189011 | Hs.49163 | putative ribonuclease III | 2.52 | 319 4809 |
| 449207 | AL044222 | Hs.23255 | nucleoporin 155 kD | 2.52 | 4045 |
| 449444 | AW818436 | | solute carrier family 16 (monocarboxylic | 2.52 | 4062 |
| 441373 | AI266421 | Hs.120179 | Homo sapiens cDNA: FLJ22133 fis, clone H | 2.51 | 3348 |
| 451380 | H09280 | Hs.13234 | ESTs | 2.51 | 4218 |
| 448641 | R31845 | Hs.21666 | insulin-like 4 (placenta) | 2.51 | 3991 |
| 428844 | AW972635 | Hs.301904 | hypothetical protein FLJ12671 | 2.51 | 2311 |
| 424259 | AK001776 | Hs.143954 | hypothetical protein FLJ10914 | 2.50 | 1822 5207 |
| 442053 | R35343 | Hs.24968 | Human DNA sequence from clone RP1-233G16 | 2.50 | 3391 |
| 402102 | | | Target Exon | 2.50 | |
| 409648 | AW451449 | Hs.57749 | ESTs | 2.50 | 391 |
| 416677 | T83470 | Hs.334840 | ESTs, Moderately similar to I78885 serin | 2.50 | 1012 |
| 446251 | AW867156 | Hs.282589 | ESTs, Weakly similar to I38022 hypotheti | 2.50 | 3739 |
| 413472 | BE242870 | Hs.75379 | solute carrier family 1 (glial high affi | 2.50 | 724 |
| 400298 | AA032279 | Hs.61635 | six transmembrane epithelial antigen of | 2.50 | 10 |
| 420807 | AA280627 | Hs.57846 | ESTs | 2.50 | 1457 |
| 451722 | H86374 | Hs.40861 | ESTs | 2.50 | 4243 |
| 438523 | H66220 | Hs.278177 | ESTs | 2.50 | 3144 |
| 402812 | | | NM_004930*: Homo sapiens capping protein | 2.49 | 39 4708 |
| 426991 | AK001536 | Hs.214410 | Homo sapiens cDNA FLJ10674 fis, clone NT | 2.49 | 2117 |
| 452092 | BE245374 | Hs.27842 | hypothetical protein FLJ11210 | 2.49 | 4268 |
| 407881 | AW072003 | Hs.40968 | heparan sulfate (glucosamine) 3-O-sulfot | 2.49 | 211 |
| 402855 | | | NM_001839*: Homo sapiens calponin 3, acid | 2.49 | 40 4709 |
| 422809 | AK001379 | Hs.121028 | hypothetical protein FLJ10549 | 2.49 | 1684 |
| 410444 | W73484 | Hs.132554 | gb: zd54e04.s1 Soares_fetal_heart_NbHH19W | 2.48 | 480 |
| 457292 | AI921270 | Hs.281462 | hypothetical protein FLJ14251 | 2.48 | 4586 |
| 408990 | AL022395 | Hs.49526 | f-box and leucine-rich repeat protein 4 | 2.48 | 321 4810 |
| 441085 | AW136551 | Hs.181245 | Homo sapiens cDNA FLJ12532 fis, clone NT | 2.48 | 3331 |
| 449209 | BE616830 | Hs.294145 | ESTs | 2.48 | 4046 |
| 439352 | BE614347 | Hs.169615 | hypothetical protein FLJ20989 | 2.48 | 3202 |
| 411979 | X85134 | Hs.72984 | retinoblastoma-binding protein 5 | 2.48 | 4872 597 |
| 434474 | AL042936 | Hs.211571 | holocytochrome c synthase (cytochrome c | 2.47 | 2842 |
| 431566 | AF176012 | Hs.260720 | J domain containing protein 1 | 2.47 | 2568 5479 |
| 453507 | AF083217 | Hs.33085 | WD repeat domain 3 | 2.47 | 4414 5778 |
| 432540 | AI821517 | Hs.105866 | ESTs | 2.47 | 2678 |
| 420085 | AI741909 | Hs.44680 | hypothetical protein FLJ20979 | 2.47 | 1381 |
| 408761 | AA057264 | Hs.238936 | ESTs, Weakly similar to (define not ava | 2.47 | 304 |
| 417018 | M16038 | Hs.80887 | v-yes-1 Yamaguchi sarcoma viral related | 2.47 | 1053 4976 |
| 428878 | AA436884 | Hs.48926 | ESTs | 2.47 | 2315 |
| 443257 | AI334040 | Hs.11614 | HSPC065 protein | 2.47 | 3514 |
| 410503 | AW975746 | Hs.188662 | KIAA1702 protein | 2.47 | 485 |
| 411248 | AA551538 | Hs.69321 | Homo sapiens cDNA FLJ14408 fis, clone HE | 2.46 | 541 |
| 416984 | H38765 | Hs.80706 | diaphorase (NADH/NADPH) (cytochrome b-5 | 2.46 | 1047 |
| 414844 | AA296874 | Hs.77494 | deoxyguanosine kinase | 2.46 | 884 |
| 452436 | BE077546 | Hs.31447 | ESTs, Moderately similar to A46010 X-lin | 2.46 | 4308 |
| 445266 | BE222118 | Hs.12479 | associated molecule with the SH3 domain | 2.45 | 3665 |
| 422363 | T55979 | Hs.115474 | replication factor C (activator 1) 3 (38 | 2.45 | 1636 |
| 445994 | NM_004724 | Hs.13512 | ZW10 (Drosophila) homolog, centromere/ki | 2.45 | 3716 5661 |
| 410595 | AW629223 | Hs.64794 | zinc finger protein 183 (RING finger, C3 | 2.45 | 495 |
| 438578 | AA811244 | | ESTs | 2.45 | 3151 |
| 437748 | AF234882 | Hs.5814 | suppression of tumorigenicity 7 | 2.45 | 3087 5591 |
| 411402 | BE297855 | Hs.69855 | NRAS-related gene | 2.45 | 552 |
| 406671 | AA129547 | Hs.285754 | met proto-oncogene (hepatocyte growth fa | 2.45 | 82 |
| 418882 | NM_004996 | Hs.89433 | ATP-binding cassette, sub-family C (CFTR | 2.45 | 1254 5033 |
| 424081 | NM_006413 | Hs.139120 | tibonuclease P (30 kD) | 2.45 | 1801 5197 |
| 439492 | AF086310 | Hs.103159 | ESTs | 2.45 | 3212 |
| 409617 | BE003760 | Hs.55209 | Homo sapiens mRNA; cDNA DKFZp434K0514 (f | 2.45 | 387 |
| 413545 | AA766632 | Hs.119451 | ESTs | 2.45 | 732 |
| 422765 | AW409701 | Hs.1578 | baculoviral IAP repeat-containing 5 (sur | 2.45 | 1680 |
| 426251 | M24283 | Hs.168383 | intercellular adhesion molecule 1 (CD54) | 2.45 | 2043 5296 |
| 428862 | NM_000346 | Hs.2316 | SRY (sex determining region Y)-box 9 (ca | 2.45 | 2313 5382 |
| 439955 | AW203959 | Hs.149532 | ESTs | 2.45 | 3249 |
| 431958 | X63629 | Hs.2877 | cadherin 3, type 1, P-cadherin (placenta | 2.45 | 2621 5498 |
| 421768 | AI923934 | Hs.108112 | histone fold protein CHRAC17; DNA polyme | 2.44 | 1560 |
| 410575 | BE207480 | Hs.6994 | Homo sapiens cDNA: FLJ22044 fis, clone H | 2.44 | 494 |
| 413551 | BE242639 | Hs.75425 | ubiquitin associated protein | 2.44 | 733 |
| 438956 | W00847 | Hs.135056 | Human DNA sequence from clone RP5-850E9 | 2.44 | 3180 |
| 418340 | NM_013286 | Hs.84162 | chromosome 3p21.1 gene sequence | 2.44 | 1190 5011 |
| 441318 | AI078234 | | ESTs | 2.44 | 3345 |
| 417386 | AL037228 | Hs.82043 | D123 gene product | 2.44 | 1090 |
| 428970 | BE276891 | Hs.194691 | retinoic acid induced 3 (RAIG1); metabo | 2.44 | 2321 |
| 448072 | AI459306 | Hs.24908 | ESTs | 2.43 | 3940 |
| 447397 | BE247676 | Hs.18442 | E-1 enzyme | 2.43 | 3856 |
| 441659 | BE564162 | Hs.250820 | hypothetical protein FLJ14827 | 2.43 | 3366 |
| 440590 | AI863446 | Hs.266308 | mosaic serine protease | 2.43 | 3301 |
| 422309 | U79745 | Hs.114924 | solute carrier family 16 (monocarboxylic | 2.43 | 1630 5146 |
| 414747 | U30872 | Hs.77204 | centromere protein F (350/400 kD, mitosin | 2.42 | 4927 873 |
| 442961 | BE614474 | | F-box only protein 22 | 2.42 | 3484 |
| 446950 | AA305800 | Hs.5672 | hypothetical protein AF140225 | 2.42 | 3806 |
| 421462 | AF016495 | Hs.104624 | aquaporin 9 | 2.42 | 1522 5108 |
| 450251 | BE080483 | | gb: QV1-BT0630-280200-086-a05 BT0630 Homo | 2.42 | 4118 |
| 450277 | AI690071 | Hs.283552 | ESTs, Weakly similar to unnamed protein | 2.42 | 4122 |
| 422150 | AI867118 | | calpastatin | 2.41 | 1609 |
| 425371 | D49441 | Hs.155981 | mesothelin | 2.41 | 1957 5259 |
| 452826 | BE245286 | Hs.301636 | peroxisomal biogenesis factor 6 | 2.41 | 4349 |
| 439708 | AI761369 | Hs.59584 | hypothetical protein FLJ21144 | 2.41 | 3231 |
| 422744 | AW268803 | Hs.119640 | hBKLF for basic kruppel like factor | 2.41 | 1678 |
| 412783 | BE276738 | Hs.74578 | DEAD/H (Asp-Glu-Ala-Asp/His) box polypep | 2.41 | 669 |
| 418526 | BE019020 | Hs.85838 | solute carrier family 16 (monocarboxylic | 2.40 | 1211 |
| 452960 | AK001335 | Hs.31137 | protein tyrosine phosphatase, receptor t | 2.40 | 4360 |
| 414368 | W70171 | Hs.75939 | uridine monophosphate kinase | 2.40 | 818 |
| 409892 | AW956113 | Hs.7149 | gb: EST368183 MAGE resequences, MAGD Homo | 2.40 | 414 |
| 442991 | BE281238 | Hs.8886 | hypothetical protein FLJ20424 | 2.40 | 3485 |
| 425216 | U81504 | Hs.155172 | adaptor-related protein complex 3, beta | 2.40 | 1938 5252 |
| 443829 | AI087954 | Hs.23348 | S-phase kinase-associated protein 2 (p45 | 2.40 | 3557 |
| 442072 | AI740832 | Hs.12311 | Homo sapiens clone 23570 mRNA sequence | 2.40 | 3395 |
| 412193 | AI684467 | Hs.144057 | ESTs | 2.40 | 617 |
| 408826 | AF216077 | Hs.48376 | Homo sapiens clone HB-2 mRNA sequence | 2.40 | 309 |
| 422631 | BE218919 | Hs.118793 | hypothetical protein FLJ10688 | 2.40 | 1665 |
| 422981 | AF026445 | Hs.122752 | TATA box binding protein (TBP)-associate | 2.40 | 1706 5165 |
| 418330 | BE409405 | | ESTs | 2.40 | 1187 |
| 434627 | AI221894 | Hs.39311 | ESTs | 2.40 | 2853 |
| 418067 | AI127958 | Hs.83393 | cystatin E/M | 2.40 | 1156 |
| 442426 | AI373062 | Hs.332938 | hypothetical protein MGC5370 | 2.40 | 3427 |
| 433561 | BE540937 | Hs.20104 | hypothetical protein FLJ00052 | 2.39 | 2769 |
| 422336 | AI761322 | Hs.115285 | dihydrolipoamide S-acetyltransferase (E2 | 2.39 | 1633 |
| 431374 | BE258532 | Hs.251871 | CTP synthase | 2.39 | 2551 |
| 437271 | AL137445 | Hs.28846 | Homo sapiens mRNA; cDNA DKFZp566O134 (fr | 2.39 | 3052 |
| 409974 | BE174106 | Hs.225641 | hypothetical protein FLJ13171 | 2.39 | 423 |
| 445921 | AW015211 | Hs.146181 | ESTs | 2.39 | 3712 |
| 431310 | AW327889 | Hs.252433 | Homo sapiens cDNA FLJ13794 fis, clone TH | 2.39 | 2545 |
| 435124 | AA725362 | Hs.120456 | ESTs | 2.38 | 2897 |
| 401405 | | | Target Exon | 2.38 | |
| 452234 | AW084176 | Hs.223296 | ESTs, Weakly similar to I38022 hypotheti | 2.38 | 4284 |
| 415214 | AI445236 | Hs.125124 | EphB2 | 2.38 | 917 |
| 404592 | | | NM_022739*: Homo sapiens E3 ubiquitin lig | 2.38 | 4725 58 |
| 434378 | AA631739 | Hs.335440 | EST | 2.38 | 2836 |
| 406203 | | | Target Exon | 2.38 | |
| 442355 | AA456539 | Hs.8262 | lysosomal-associated membrane protein 2 | 2.38 | 3424 |
| 425548 | AA890023 | Hs.1906 | prolactin receptor | 2.38 | 1978 |
| 409132 | AJ224538 | Hs.50732 | protein kinase, AMP-activated, beta 2 no | 2.37 | 338 4813 |
| 404661 | | | C9000306*: gi\|12737280\|ref\|XP_006682.2\| k | 2.37 | |
| 431127 | U66618 | Hs.250581 | SWI/SNF related, matrix associated, acti | 2.37 | 2532 |
| 453905 | NM_002314 | Hs.36566 | LIM domain kinase 1 | 2.37 | 4450 5788 |
| 416114 | AI695549 | Hs.183868 | glucuronidase, beta | 2.37 | 973 |
| 413437 | BE313164 | Hs.75361 | gene from NF2/meningioma region of 22q12 | 2.37 | 722 |
| 418403 | D86978 | Hs.84790 | KIAA0225 protein | 2.37 | 1197 5015 |
| 419092 | J05581 | Hs.89603 | mucin 1, transmembrane | 2.37 | 1275 5038 |
| 434094 | AA305599 | Hs.238205 | hypothetical protein PRO2013 | 2.36 | 2814 |
| 450800 | BE395161 | Hs.1390 | proteasome (prosome, macropain) subunit, | 2.36 | 4167 |
| 452323 | W44356 | Hs.292812 | ESTs, Weakly similar to T33468 hypotheti | 2.36 | 4296 |
| 411678 | AI907114 | Hs.71465 | squalene epoxidase | 2.35 | 568 |
| 414774 | X02419 | Hs.77274 | plasminogen activator, urokinase | 2.35 | 4928 877 |
| 421379 | Y15221 | Hs.103982 | small inducible cytokine subfamily B (Cy | 2.35 | 1515 5104 |
| 448030 | N30714 | Hs.325960 | membrane-spanning 4-domains, subfamily A | 2.35 | 3936 |
| 454645 | AW811928 | | gb: RC2-ST0168-240300-017-b02 ST0168 Homo | 2.35 | 4493 |
| 425368 | AB014595 | Hs.155976 | cullin 4B | 2.35 | 1956 5258 |
| 425212 | AW962253 | Hs.171618 | ESTs | 2.35 | 1937 |
| 426098 | NM_014906 | Hs.166351 | KIAA1072 protein | 2.35 | 2026 5291 |
| 432281 | AK001239 | Hs.274263 | hypothetical protein FLJ10377 | 2.35 | 2652 5505 |
| 418592 | X99226 | Hs.284153 | Fanconi anemia, complementation group A | 2.35 | 1215 5020 |
| 412043 | BE156622 | Hs.333371 | Homo sapiens clone TA40 untranslated mRN | 2.35 | 604 |
| 431696 | AA259068 | Hs.267819 | protein phosphatase 1, regulatory (inhib | 2.35 | 2584 |
| 451065 | AW295132 | Hs.222231 | ESTs, Weakly similar to granule cell mar | 2.35 | 4188 |
| 416018 | AW138239 | Hs.78977 | proprotein convertase subtilisin/kexin t | 2.35 | 966 |
| 432226 | AW182766 | Hs.273558 | phosphate cytidylyltransferase 1, cholin | 2.35 | 2645 |
| 425048 | H05468 | Hs.164502 | ESTs | 2.35 | 1914 |
| 409187 | AF154830 | Hs.50966 | carbamoyl-phosphate synthetase 1, mitoch | 2.35 | 347 4816 |
| 414629 | AA345824 | Hs.76688 | carboxylesterase 1 (monocyte/macrophage | 2.35 | 855 |
| 413010 | AA393273 | Hs.75133 | transcription factor 6-like 1 (mitochond | 2.35 | 689 |
| 416426 | AA180256 | Hs.210473 | Homo sapiens cDNA FLJ14872 fis, clone PL | 2.35 | 996 |
| 441021 | AW578716 | Hs.7644 | H1 histone family, member 2 | 2.35 | 3326 |
| 435005 | U80743 | Hs.306094 | trinucleotide repeat containing 12 | 2.35 | 2886 5560 |
| 407204 | R41933 | Hs.140237 | ESTs, Weakly similar to ALU1_HUMAN ALU S | 2.35 | 136 |
| 445654 | X91247 | Hs.13046 | thioredoxin reductase 1 | 2.34 | 3691 5658 |
| 437682 | AA476652 | Hs.94952 | Homo sapiens cDNA: FLJ23371 fis, clone H | 2.34 | 3083 |
| 417333 | AL157545 | Hs.173179 | bromodomain and PHD finger containing, 3 | 2.34 | 1081 |
| 417831 | H16423 | Hs.82685 | CD47 antigen (Rh-related antigen, integr | 2.34 | 1128 |
| 453204 | R10799 | Hs.191990 | ESTs | 2.34 | 4385 |
| 430791 | AA486293 | Hs.272068 | ESTs, Weakly similar to ALU3_HUMAN ALU S | 2.34 | 2513 |
| 415752 | BE314524 | Hs.78776 | putative transmembrane protein | 2.34 | 948 |
| 432788 | AA521091 | Hs.178499 | Homo sapiens cDNA: FLJ23117 fis, clone L | 2.34 | 2699 |
| 429857 | AF089897 | Hs.294030 | topoisomerase-related function protein 4 | 2.33 | 2419 5428 |
| 453857 | AL080235 | Hs.35861 | Ras-induced senescence 1 (RIS1) | 2.33 | 4437 5785 |
| 418372 | AA311833 | Hs.84318 | replication protein A1 (70 kD) | 2.33 | 1191 |
| 424755 | AB033094 | Hs.152925 | KIAA1268 protein | 2.33 | 1882 5231 |
| 432623 | AA557351 | Hs.152448 | ESTs, Moderately similar to S14147 multi | 2.33 | 2686 |
| 434815 | AF155582 | Hs.46744 | core1 UDP-galactose: N-acetylgalactosamin | 2.32 | 2870 5555 |
| 431183 | NM_006855 | Hs.250696 | KDEL (Lys-Asp-Glu-Leu) endoplasmic retic | 2.32 | 2537 5472 |
| 409196 | NM_001874 | Hs.334873 | carboxypeptidase M | 2.32 | 350 4817 |
| 426272 | AW450671 | Hs.189284 | ESTs | 2.31 | 2046 |
| 447644 | AW861622 | Hs.108646 | Homo sapiens cDNA FLJ14934 fis, clone PL | 2.31 | 3886 |
| 429276 | AF056085 | Hs.198612 | G protein-coupled receptor 51 | 2.31 | 2346 5397 |
| 456497 | AW967956 | Hs.123648 | ESTs, Weakly similar to AF108460 1 ubinu | 2.30 | 4546 |
| 439778 | AL109729 | Hs.99364 | putative transmembrane protein | 2.30 | 3235 |
| 446237 | AW270515 | Hs.149596 | Homo sapiens, Similar to RIKEN cDNA 2310 | 2.30 | 3738 |
| 405411 | | | ENSP00000252213: SODIUM BICARBONATE COTRA | 2.30 | |
| 426262 | AI792141 | Hs.196270 | folate transporter/carrier | 2.30 | 2045 |
| 400639 | | | C10000999*: gi\|2143593\|pir∥S55277 annexi | 2.30 | 19 |
| 424194 | BE245833 | Hs.169854 | gb: TCBAP1E1908 Pediatric pre-B cell acut | 2.30 | 1813 |
| 412661 | N32860 | Hs.24611 | ESTs, Weakly similar to I54374 gene NF2 | 2.30 | 657 |
| 445523 | Z30118 | Hs.293788 | ESTs, Moderately similar to unnamed prot | 2.30 | 3682 |
| 405705 | | | C12000104*: gi\|4503519\|ref\|NP_003745.1\|e | 2.30 | |
| 420596 | NM_002692 | Hs.99185 | polymerase (DNA directed), epsilon 2 | 2.30 | 1435 5082 |
| 429433 | AA452899 | Hs.213586 | ESTs, Weakly similar to KIAA1353 protein | 2.30 | 2368 |
| 455540 | BE080231 | | gb: RC4-BT0629-120200-012-f11 BT0629 Homo | 2.30 | 4514 |
| 426088 | AF038007 | Hs.166196 | ATPase, Class I, type 8B, member 1 | 2.30 | 2024 5289 |
| 414485 | W27026 | Hs.182625 | VAMP (vesicle-associated membrane protei | 2.30 | 835 |
| 426427 | M86699 | Hs.169840 | TTK protein kinase | 2.30 | 2065 5303 |
| 407633 | NM_007069 | Hs.37189 | similar to rat HREV107 | 2.30 | 173 4776 |
| 437659 | AB007944 | Hs.5737 | KIAA0475 gene product | 2.30 | 3079 5589 |
| 438510 | AL080220 | Hs.6285 | DKFZP586P0123 protein | 2.30 | 3143 5595 |
| 414178 | AW957372 | Hs.46791 | ESTs, Weakly similar to I38022 hypotheti | 2.30 | 797 |
| 424339 | BE257148 | | endoglycan | 2.30 | 1831 |
| 419594 | AA013051 | Hs.91417 | topoisomerase (DNA) II binding protein | 2.29 | 1339 |
| 425424 | NM_004954 | Hs.157199 | ELKL motif kinase | 2.29 | 1962 5263 |
| 424649 | BE242035 | Hs.151461 | embryonic ectoderm development | 2.29 | 1867 |
| 408839 | AW277084 | | gb: xp61h09.x1 NCI_CGAP_Ov39 Homo sapiens | 2.29 | 311 |
| 414883 | AA926960 | | CDC28 protein kinase 1 | 2.29 | 887 |
| 453454 | AW052006 | | PRP4/STK/WD splicing factor | 2.29 | 4407 |
| 446080 | AI221741 | Hs.117777 | ESTs | 2.29 | 3723 |
| 450937 | R49131 | Hs.26267 | ATP-dependant interferon response protei | 2.29 | 4177 |
| 459241 | AA032276 | Hs.99010 | ESTs, Moderately similar to T14342 NSD1 | 2.28 | 4661 |
| 426788 | U66615 | Hs.172280 | SWI/SNF related, matrix associated, acti | 2.28 | 2099 5320 |
| 417720 | AA205625 | Hs.208067 | ESTs | 2.28 | 1116 |
| 417542 | J04129 | Hs.82269 | progestagen-associated endometrial prote | 2.28 | 1101 4990 |
| 456141 | AI751357 | Hs.288741 | Homo sapiens cDNA: FLJ22256 fis, clone H | 2.28 | 4529 |
| 425523 | AB007948 | Hs.158244 | KIAA0479 protein | 2.28 | 1973 5268 |
| 403055 | | | C2002219*: gi\|12737280\|ref\|XP_006682.2\|k | 2.28 | |
| 425707 | AF115402 | Hs.11713 | E74-like factor 5 (ets domain transcript | 2.28 | 1992 5277 |
| 418322 | AA284166 | Hs.84113 | cyclin-dependent kinase inhibitor 3 (CDK | 2.28 | 1184 |
| 412505 | AA974491 | Hs.21734 | ESTs | 2.28 | 638 |
| 453863 | X02544 | Hs.572 | orosomucoid 1 | 2.28 | 4438 5786 |
| 410275 | U85658 | Hs.61796 | transcription factor AP-2 gamma (activat | 2.27 | 462 4842 |
| 421535 | AB002359 | Hs.105478 | phosphoribosylformylglycinamidine syntha | 2.27 | 1535 5115 |
| 451150 | AI888124 | Hs.285280 | Homo sapiens cDNA: FLJ22096 fis, clone H | 2.27 | 4197 |
| 423198 | M81933 | Hs.1634 | cell division cycle 25A | 2.27 | 1727 5174 |
| 407777 | AA161071 | Hs.71465 | squalene epoxidase | 2.27 | 194 |
| 451232 | AI769922 | Hs.20023 | ESTs | 2.27 | 4201 |
| 430316 | NM_000875 | Hs.239176 | insulin-like growth factor 1 receptor | 2.27 | 2470 5445 |
| 400884 | | | Target Exon | 2.27 | |
| 436608 | AA628980 | Hs.192371 | down syndrome critical region protein DS | 2.26 | 2997 |
| 434423 | NM_006769 | Hs.3844 | LIM domain only 4 | 2.26 | 2839 5548 |
| 438613 | C05569 | Hs.243122 | hypothetical protein FLJ13057 similar to | 2.26 | 3153 |
| 421180 | BE410992 | Hs.258730 | heme-regulated initiation factor 2-alpha | 2.26 | 1486 |
| 456844 | AI264155 | Hs.152981 | CDP-diacylglycerol synthase (phosphatida | 2.26 | 4562 |
| 422010 | AA302049 | Hs.31181 | Homo sapiens cDNA: FLJ23230 fis, clone C | 2.26 | 1593 |
| 440100 | BE382685 | Hs.158549 | ESTs, Weakly similar to T2D3_HUMAN TRANS | 2.25 | 3263 |
| 445871 | AI702901 | Hs.145582 | ESTs, Weakly similar to FOR4 MOUSE FORMI | 2.25 | 3706 |
| 422955 | AW967824 | No.324237 | ESTs | 2.25 | 1697 |
| 404877 | | | NM_005365: Homo sapiens melanoma antigen, | 2.25 | 4729 63 |
| 401160 | | | Target Exon | 2.25 | |
| 418764 | N30531 | Hs.42215 | protein phosphatase 1, regulatory subuni | 2.25 | 1238 |
| 452243 | AL355715 | Hs.28555 | programmed cell death 9 (PDCD9) | 2.25 | 4287 5756 |
| 452206 | AW340281 | Hs.33074 | Homo sapiens, clone IMAGE: 3606519, mRNA, | 2.25 | 4281 |
| 423290 | AA324130 | Hs.27721 | Wolf-Hirschhorn syndrome candidate 1-lik | 2.25 | 1734 |
| 428405 | Y00762 | Hs.2266 | cholinergic receptor, nicotinic, alpha p | 2.25 | 2250 5357 |
| 413273 | U75679 | Hs.75257 | stem-loop (histone) binding protein | 2.25 | 4896 704 |
| 426028 | NM_001110 | Hs.172028 | a disintegrin and metalloproteinase doma | 2.25 | 2020 5287 |
| 428028 | U52112 | Hs.182018 | interleukin-1 receptor-associated kinase | 2.25 | 2215 |
| 427691 | AW194426 | Hs.20726 | UDP-N-acetyl-alpha-D-galactosamine: polyp | 2.24 | 2181 |
| 429588 | AI080271 | | ESTs | 2.24 | 2391 |
| 429966 | BE081342 | Hs.283037 | HSPC039 protein | 2.24 | 2431 |
| 416655 | AW968613 | Hs.79428 | BCL2/adenovirus E1B 19 kD-interacting pro | 2.24 | 1010 |
| 412452 | AA215731 | | suppression of tumorigenicity 5 | 2.24 | 634 |
| 411580 | AL080088 | Hs.70877 | DKFZP564K2062 protein | 2.24 | 4865 561 |
| 457653 | AI820719 | Hs.76853 | DnaJ (Hsp40) homolog, subfamily A, membe | 2.24 | 4597 |
| 433002 | AF048730 | Hs.279906 | cyclin T1 | 2.24 | 2720 5522 |
| 419362 | N64116 | Hs.24624 | hypothetical protein FLJ21945 | 2.24 | 1306 |
| 434340 | AI193043 | Hs.128685 | ESTs, Weakly similar to T17226 hypotheti | 2.24 | 2830 |
| 420186 | NM_015925 | Hs.95697 | liver-specific bHLH-Zip transcription fa | 2.24 | 1392 5066 |
| 430375 | AW371048 | Hs.93758 | H4 histone family, member H | 2.23 | 2477 |
| 448356 | AL120837 | Hs.20993 | high-glucose-regulated protein 8 | 2.23 | 3958 |
| 420554 | AL133022 | Hs.98845 | Homo sapiens mRNA; cDNA DKFZp434I0121 (f | 2.23 | 1431 |
| 430016 | NM_004736 | Hs.227656 | xenotropic and polytropic retrovirus rec | 2.23 | 2437 5432 |
| 418004 | U37519 | Hs.87539 | aldehyde dehydrogenase 3 family, member | 2.23 | 1145 4997 |
| 440457 | BE387593 | Hs.21321 | Homo sapiens clone FLB9213 PRO2474 mRNA, | 2.22 | 3289 |
| 439924 | AI985897 | Hs.125293 | ESTs | 2.22 | 3242 |
| 415889 | R24563 | | VPS10 domain receptor protein | 2.22 | 957 |
| 421353 | AW292857 | Hs.255130 | ESTs | 2.22 | 1511 |
| 413476 | U25849 | Hs.75393 | acid phosphatase 1, soluble | 2.22 | 4902 726 |
| 430355 | NM_006219 | Hs.239818 | phosphoinositide-3-kinase, catalytic, be | 2.22 | 2475 5449 |
| 442092 | AW578669 | | hypothetical protein FLJ12439 | 2.22 | 3397 |
| 426181 | AA371422 | Hs.334371 | hypothetical protein MGC13096 | 2.22 | 2037 |
| 450074 | AI367213 | Hs.14070 | hypothetical protein FLJ14166 | 2.22 | 4103 |
| 407930 | AA045847 | Hs.188361 | Homo sapiens cDNA FLJ12807 fis, clone NT | 2.22 | 215 |
| 424534 | D87682 | Hs.150275 | KIAA0241 protein | 2.21 | 1856 5215 |
| 432195 | AJ243669 | Hs.8127 | KIAA0144 gene product | 2.21 | 2642 5503 |
| 420734 | AW972872 | Hs.293736 | ESTs | 2.21 | 1447 |
| 422390 | AW450893 | Hs.121830 | ESTs, Weakly similar to T42682 hypotheti | 2.21 | 1638 |
| 414761 | AU077228 | Hs.77256 | enhancer of zeste (Drosophila) homolog 2 | 2.21 | 875 |
| 414915 | NM_002462 | Hs.76391 | myxovirus (influenza) resistance 1, homo | 2.21 | 4934 892 |
| 418030 | BE207573 | Hs.83321 | neuromedin B | 2.21 | 1150 |
| 424736 | AF230877 | Hs.152701 | microtubule-interacting protein that ass | 2.21 | 1880 5230 |
| 428788 | AF082283 | Hs.193516 | B-cell CLL/lymphoma 10 | 2.21 | 2299 5378 |
| 408681 | AW953853 | Hs.281462 | ESTs, Weakly similar to I38022 hypotheti | 2.21 | 293 |
| 419485 | AA489023 | Hs.99807 | ESTs, Weakly similar to unnamed protein | 2.21 | 1318 |
| 446627 | AI973016 | Hs.15725 | hypothetical protein SBBI48 | 2.20 | 3772 |
| 440704 | M69241 | Hs.162 | insulin-like growth factor binding prote | 2.20 | 3314 5613 |
| 436905 | N31273 | Hs.42380 | ESTs | 2.20 | 3020 |
| 454034 | NM_000691 | Hs.575 | aldehyde dehydrogenase 3 family, member | 2.20 | 4462 5792 |
| 459376 | BE258770 | | Homo sapiens, clone IMAGE: 3344506, mRNA, | 2.20 | 4667 |
| 444527 | NM_005408 | Hs.11383 | small inducible cytokine subfamily A (Cy | 2.20 | 3605 5640 |
| 403429 | | | C3000329*: gi\|8922921\|ref\|NP_060821.1\| hy | 2.20 | |
| 416814 | AW192307 | Hs.80042 | dolichyl-P-Glc: Man9GlcNAc2-PP-dolichylgl | 2.20 | 1026 |
| 403154 | | | NM_022780*: Homo sapiens hypothetical pro | 2.20 | 43 4712 |
| 410434 | AF051152 | Hs.63668 | toll-like receptor 2 | 2.20 | 478 4847 |
| 425810 | AI923627 | Hs.31903 | ESTs | 2.20 | 1998 |
| 417173 | U61397 | Hs.81424 | ubiquitin-like 1 (sentrin) | 2.20 | 1068 4979 |
| 437587 | AI591222 | Hs.72325 | Human DNA sequence from clone RP1-187J11 | 2.20 | 3072 |
| 423020 | AA383092 | Hs.1608 | replication protein A3 (14 kD) | 2.20 | 1711 |
| 429626 | U36787 | Hs.211571 | holocytochrome c synthase (cytochrome c | 2.20 | 2399 5418 |
| 417933 | X02308 | Hs.82962 | thymidylate synthetase | 2.20 | 1139 4996 |
| 436972 | AA284679 | Hs.25640 | claudin 3 | 2.20 | 3024 |
| 421977 | W94197 | Hs.110165 | ribosomal protein L26 homolog | 2.20 | 1588 |
| 416658 | U03272 | Hs.79432 | fibrillin 2 (congenital contractural ara | 2.20 | 1011 4966 |
| 417750 | AI267720 | Hs.260523 | synovial sarcoma, translocated to X chro | 2.19 | 1120 |
| 413281 | AA861271 | Hs.222024 | transcription factor BMAL2 | 2.19 | 706 |
| 408150 | BE620274 | Hs.43112 | Homo sapiens mRNA; cDNA DKFZp434B1620 (f | 2.19 | 238 |
| 422134 | AW179019 | Hs.112110 | mitochondrial ribosomal protein L42 | 2.19 | 1608 |
| 410723 | AA100683 | | basigin (OK blood group) | 2.19 | 511 |
| 445786 | AW629819 | Hs.144502 | hypothetical protein FLJ22055 | 2.19 | 3697 |
| 449162 | AI632740 | Hs.10476 | ESTs | 2.19 | 4041 |
| 416097 | BE387371 | Hs.118964 | hypothetical protein FLJ20085 | 2.19 | 971 |
| 429343 | AK000785 | Hs.199480 | Homo sapiens, Similar to epsin 3, clone | 2.18 | 2356 5402 |
| 409456 | U34962 | Hs.54473 | cardiac-specific homeo box | 2.18 | 374 4825 |
| 411734 | AW374954 | Hs.71779 | Homo sapiens DNA from chromosome 19, cos | 2.18 | 572 |
| 401833 | | | integrin-linked kinase-associated serine | 2.18 | |
| 409139 | AI681917 | Hs.3321 | ESTs, Highly similar to IRX1_HUMAN IROQU | 2.18 | 339 |
| 446567 | NM_007247 | Hs.15384 | AP1 gamma subunit binding protein 1 | 2.18 | 3764 5672 |
| 440334 | BE276112 | Hs.7165 | zinc finger protein 259 | 2.17 | 3283 |
| 406627 | T64904 | Hs.163780 | ESTs | 2.17 | 80 |
| 447842 | AW160804 | Hs.247302 | twisted gastrulation | 2.17 | 3913 |
| 417433 | BE270266 | Hs.82128 | 5T4 oncofetal trophoblast glycoprotein | 2.17 | 1094 |
| 428781 | AF164799 | Hs.193384 | putatative 28 kDa protein | 2.17 | 2297 5376 |
| 410512 | AA085603 | Hs.250570 | hypothetical protein MGC3180 | 2.17 | 487 |
| 436995 | AI160015 | Hs.125489 | ESTs | 2.17 | 3026 |
| 442577 | AA292998 | Hs.163900 | ESTs | 2.17 | 3447 |
| 402322 | | | Target Exon | 2.17 | |
| 429462 | AI890356 | | Homo sapiens, clone IMAGE: 3536432, mRNA, | 2.17 | 2373 |
| 412326 | R07566 | Hs.73817 | small inducible cytokine A3 (homologous | 2.17 | 624 |
| 426722 | U53823 | Hs.171952 | occludin | 2.17 | 2091 5316 |
| 406867 | AA157857 | Hs.182265 | keratin 19 | 2.17 | 105 |
| 424399 | AI905687 | | AI905687: IL-BT095-190199-019 BT095 Homo | 2.17 | 1840 |
| 427709 | AI631811 | Hs.180403 | STRIN protein | 2.16 | 2186 |
| 410627 | AA181339 | Hs.929 | myosin, heavy polypeptide 7, cardiac mus | 2.16 | 499 |
| 429901 | AK000502 | Hs.56237 | hypothetical protein FLJ20495 | 2.16 | 2424 5429 |
| 440282 | BE262386 | | clones 23667 and 23775 zinc finger prote | 2.16 | 3277 |
| 422975 | AA347720 | Hs.122669 | KIAA0264 protein | 2.16 | 1704 |
| 427254 | AL121523 | Hs.97774 | ESTs | 2.16 | 2135 |
| 444006 | BE395085 | Hs.10086 | type I transmembrane protein Fn14 | 2.16 | 3568 |
| 424921 | AA348491 | Hs.322456 | hypothetical protein DKFZp761D0211 | 2.16 | 1899 |
| 405204 | | | NM_002086*: Homo sapiens growth factor re | 2.16 | 4731 65 |
| 412988 | BE046680 | | gb: hn42h03.x1 NCI_CGAP_RDF2 Homo sapiens | 2.15 | |
| 444151 | AW972917 | Hs.128749 | alpha-methylacyl-CoA racemase | 2.15 | 3577 |
| 417185 | NM_002484 | Hs.81469 | nucleotide binding protein 1 (E. coliMin | 2.15 | 1070 4980 |
| 447229 | BE617135 | Hs.22612 | hypothetical protein DKFZp566D1346 | 2.15 | 3832 |
| 414727 | BE466904 | Hs.190162 | gb: hz28f03.x1 NCI_CGAP_GC6 Homo sapiens | 2.15 | 870 |
| 435542 | AA687376 | | ESTs | 2.15 | 2925 |
| 410307 | AF022913 | Hs.62187 | phosphatidylinositol glycan, class K | 2.15 | 464 4844 |
| 442611 | BE077155 | Hs.177537 | hypothetical protein DKFZp761B1514 | 2.15 | 3453 |
| 418849 | AW474547 | Hs.53565 | Homo sapiens PIG-M mRNA for mannosyltran | 2.15 | 1249 |
| 418647 | AA226198 | | gb: nc26a07.s1 NCI_CGAP_Pr1 Homo sapiens | 2.15 | 1218 |
| 422330 | D30783 | Hs.115263 | epiregulin | 2.15 | 1632 5147 |
| 418437 | AA771738 | Hs.348000 | ESTs, Moderately similar to ALU5_HUMAN A | 2.15 | 1201 |
| 457100 | AA417878 | Hs.48401 | ESTs, Moderately similar to ALU8_HUMAN A | 2.15 | 4578 |
| 407748 | AL079409 | Hs.38176 | KIAA0606 protein; SCN Circadian Oscillat | 2.15 | 188 |
| 444070 | NM_015367 | Hs.10267 | MIL1 protein | 2.15 | 3571 5635 |
| 408901 | AK001330 | Hs.48855 | hypothetical protein FLJ10468 | 2.15 | 316 4808 |
| 444927 | AW016637 | Hs.199425 | ESTs | 2.15 | 3640 |
| 429986 | AF092047 | Hs.227277 | sine oculis homeobox (Drosophila) homolo | 2.15 | 2434 5431 |
| 430178 | AW449612 | Hs.152475 | 3′UTR of: achaete-scute complex (Drosoph | 2.15 | 2451 |
| 410252 | AW821182 | Hs.61418 | microfibrillar-associated protein 1 | 2.15 | 460 |
| 447669 | AL049985 | Hs.19180 | Homo sapiens mRNA; cDNA DKFZp564E122 (fr | 2.15 | 3888 |
| 437270 | R18087 | Hs.323769 | cisplatin resistance related protein CRR | 2.14 | 3051 |
| 458809 | AW972512 | Hs.20985 | sin3-associated polypeptide, 30 kD | 2.14 | 4637 |
| 418057 | NM_012151 | Hs.83363 | coagulation factor VIII-associated (intr | 2.14 | 1153 5002 |
| 415279 | F04237 | Hs.1447 | glial fibrillary acidic protein | 2.14 | 923 |
| 444418 | AL034417 | Hs.11169 | Gene 33/Mig-6 | 2.14 | 3596 |
| 430301 | AI902657 | Hs.188662 | KIAA1702 protein | 2.14 | 2466 |
| 447587 | AW292139 | Hs.115789 | ESTs | 2.14 | 3884 |
| 442767 | AI017208 | Hs.131149 | ESTs | 2.14 | 3467 |
| 425811 | AL039104 | Hs.159557 | karyopherin alpha 2 (RAG cohort 1, impor | 2.14 | 1999 |
| 458882 | R34993 | Hs.226666 | ESTs, Moderately similar to I54374 gene | 2.14 | 4643 |
| 436854 | AA749167 | Hs.173911 | ESTs | 2.13 | 3010 |
| 439588 | AA838166 | Hs.174644 | hypothetical protein FLJ21669 | 2.13 | 3221 |
| 416975 | NM_004131 | Hs.1051 | granzyme B (granzyme 2, cytotoxic T-lymp | 2.13 | 1045 4974 |
| 427715 | BE245274 | Hs.180428 | KIAA1181 protein | 2.13 | 2188 |
| 415014 | AW954064 | Hs.24951 | ESTs | 2.13 | 900 |
| 417389 | BE260964 | Hs.82045 | midkine (neurite growth-promoting factor | 2.13 | 1091 |
| 449955 | AI676010 | Hs.224043 | ESTs | 2.13 | 4093 |
| 448920 | AW408009 | Hs.22580 | alkylglycerone phosphate synthase | 2.13 | 4020 |
| 419767 | W73306 | Hs.306668 | Homo sapiens cDNA FLJ14089 fis, clone MA | 2.13 | 1361 |
| 427674 | NM_003528 | Hs.2178 | H2B histone family, member Q | 2.13 | 2177 5342 |
| 424765 | AA428211 | | hypothetical protein FLJ14033 similar to | 2.13 | 1883 |
| 439306 | BE220199 | | WD40 protein Ciao1 | 2.13 | 3197 |
| 416361 | AW204907 | Hs.6872 | ESTs, Weakly similar to CA13_HUMAN COLLA | 2.12 | 989 |
| 407792 | AI077715 | Hs.39384 | putative secreted ligand homologous to f | 2.12 | 196 |
| 421875 | AA299607 | Hs.98969 | ESTs | 2.12 | 1574 |
| 422405 | AA310278 | | ESTs | 2.12 | 1640 |
| 414907 | X90725 | Hs.77597 | polo (Drosophia)-like kinase | 2.12 | 4933 891 |
| 414602 | AW630088 | Hs.76550 | Homo sapiens mRNA; cDNA DKFZp564B1264 (f | 2.12 | 853 |
| 400203 | | | Eos Control | 2.12 | |
| 427779 | AA906997 | Hs.180780 | TERA protein | 2.11 | 2195 |
| 419667 | AU077005 | Hs.92208 | a disintegrin and metalloproteinase doma | 2.11 | 1346 |
| 420460 | AA262331 | Hs.48376 | Homo sapiens clone HB-2 mRNA sequence | 2.11 | 1423 |
| 447711 | AI459554 | Hs.161286 | ESTs | 2.11 | 3895 |
| 413838 | AV661185 | Hs.75574 | mitochondrial ribosomal protein L19 | 2.11 | 757 |
| 419373 | NM_003244 | Hs.90077 | TG-interacting factor (TALE family homeo | 2.11 | 1307 5045 |
| 419741 | NM_007019 | Hs.93002 | ubiquitin carrier protein E2-C | 2.11 | 1355 5056 |
| 452429 | AK000149 | Hs.29493 | hypothetical protein FLJ20142 | 2.11 | 4307 5758 |
| 431797 | BE169641 | Hs.270134 | hypothetical protein FLJ20280 | 2.11 | 2601 |
| 421690 | AW162667 | Hs.106857 | calbindin 2, (29 kD, calretinin) | 2.11 | 1554 |
| 446994 | AV650435 | Hs.16755 | MBIP protein | 2.11 | 3809 |
| 424629 | M90656 | Hs.151393 | glutamate-cysteine ligase, catalytic sub | 2.10 | 1865 5221 |
| 426216 | N77630 | Hs.13895 | Homo sapiens cDNA FLJ11654 fis, clone HE | 2.10 | 2040 |
| 403961 | | | Target Exon | 2.10 | |
| 434170 | AA626509 | Hs.122329 | ESTs | 2.10 | 2817 |
| 432734 | AA837396 | Hs.263925 | LIS1-interacting protein NUDE1, rat homo | 2.10 | 2696 |
| 414998 | NM_002543 | Hs.77729 | oxidised low density lipoprotein (lectin | 2.10 | 4938 899 |
| 426410 | BE298446 | Hs.305890 | BCL2-like 1 | 2.10 | 2063 |
| 412700 | BE222433 | | ESTs, Weakly similar to I38022 hypotheti | 2.10 | 660 |
| 418397 | NM_001269 | Hs.84746 | chromosome condensation 1 | 2.10 | 1195 5013 |
| 449249 | T52285 | Hs.193115 | Homo sapiens mRNA for KIAA1764 protein, | 2.10 | 4050 |
| 447401 | BE618582 | Hs.97661 | ESTs | 2.10 | 3858 |
| 433745 | AF075320 | Hs.28980 | hypothetical protein FLJ14540 | 2.10 | 2786 |
| 410232 | AW372451 | Hs.61184 | CGI-79 protein | 2.10 | 458 |
| 452335 | AW188944 | Hs.61272 | ESTs | 2.10 | 4297 |
| 454427 | AW605620 | Hs.76064 | ribosomal protein L27a | 2.10 | 4483 |
| 406740 | AA577274 | | gb: nm85g07.s1 NCI_CGAP_Co9 Homo sapiens | 2.10 | 95 |
| 403969 | | | ENSP00000034663: Zinc finger protein 131 | 2.10 | |
| 408405 | AK001332 | Hs.44672 | hypothetical protein FLJ10470 | 2.10 | 264 4796 |
| 433160 | AW207002 | Hs.134342 | TASP for testis-specific adriamycin sens | 2.09 | 2742 |
| 425118 | AU076611 | Hs.154672 | methylene tetrahydrofolate dehydrogenase | 2.09 | 1923 |
| 448556 | AW885606 | Hs.5064 | ESTs | 2.09 | 3985 |
| 428966 | AF059214 | Hs.194687 | cholesterol 25-hydroxylase | 2.09 | 2320 5385 |
| 447887 | AA114050 | Hs.19949 | caspase 8, apoptosis-related cysteine pr | 2.09 | 3918 |
| 426820 | U73328 | Hs.172648 | distal-less homeobox 4 | 2.09 | 2102 5322 |
| 435538 | AB011540 | Hs.4930 | low density lipoprotein receptor-related | 2.09 | 2924 5565 |
| 449008 | AW578003 | Hs.22826 | tropomodulin 3 (ubiquitous) | 2.09 | 4026 |
| 419252 | AW138434 | Hs.129805 | ESTs | 2.08 | 1293 |
| 401192 | | | Target Exon | 2.08 | |
| 419152 | L12711 | Hs.89643 | transketolase (Wernicke-Korsakoff syndro | 2.08 | 1283 5040 |
| 453164 | F33692 | Hs.32018 | SNARE associated protein snapin | 2.08 | 4381 |
| 426158 | NM_001982 | Hs.199067 | v-erb-b2 avian erythroblastic leukemia v | 2.08 | 2033 5294 |
| 422616 | BE300330 | Hs.118725 | selenophosphate synthetase 2 | 2.08 | 1663 |
| 422684 | BE561617 | Hs.119192 | H2A histone family, member Z | 2.08 | 1673 |
| 431630 | NM_002204 | Hs.265829 | integrin, alpha 3 (antigen CD49C, alpha | 2.08 | 2578 5483 |
| 414341 | D80004 | Hs.75909 | KIAA0182 protein | 2.08 | 4919 813 |
| 456806 | AI222298 | Hs.140720 | GSK-3 binding protein FRAT2 | 2.08 | 4561 |
| 459646 | AW883968 | Hs.321190 | gb: QV3-OT0063-290300-135-c04 OT0063 Homo | 2.08 | 4674 |
| 454417 | AI244459 | Hs.110826 | trinucleotide repeat containing 9 | 2.08 | 4480 |
| 442481 | N99828 | | gb: za32c04.r1 Soares fetal liver spleen | 2.07 | 3434 |
| 430677 | Z26317 | | desmoglein 2 | 2.07 | 2504 5461 |
| 420319 | AW406289 | Hs.96593 | hypothetical protein | 2.07 | 1410 |
| 448633 | AA311426 | Hs.21635 | tubulin, gamma 1 | 2.07 | 3990 |
| 417863 | AB000450 | Hs.82771 | vaccinia related kinase 2 | 2.07 | 1131 4995 |
| 411263 | BE297802 | Hs.69360 | kinesin-like 6 (mitotic centromere-assoc | 2.07 | 544 |
| 450157 | AW961576 | Hs.60178 | ESTs | 2.07 | 4107 |
| 410491 | AA465131 | Hs.64001 | Homo sapiens clone 25218 mRNA sequence | 2.07 | 484 |
| 440594 | AW445167 | Hs.126036 | ESTs | 2.07 | 3302 |
| 401832 | | | integrin-linked kinase-associated serine | 2.06 | |
| 401797 | | | Target Exon | 2.06 | |
| 443683 | BE241717 | Hs.9676 | uncharacterized hypothalamus protein HT0 | 2.06 | 3539 |
| 425474 | Z48054 | Hs.158084 | peroxisome receptor 1 | 2.06 | 1970 |
| 433658 | L03678 | Hs.156110 | immunoglobulin kappa constant | 2.06 | 2778 5539 |
| 452012 | AA307703 | Hs.279766 | kinesin family member 4A | 2.06 | 4262 |
| 453331 | AI240665 | | ESTs | 2.06 | 4396 |
| 410407 | X66839 | Hs.63287 | carbonic anhydrase IX | 2.06 | 474 4846 |
| 414983 | L17128 | Hs.77719 | gamma-glutamyl carboxylase | 2.06 | 4937 897 |
| 456465 | M94065 | Hs.94925 | dihydroorotate dehydrogenase | 2.06 | 4544 5798 |
| 446111 | W56338 | Hs.13880 | CGI-143 protein | 2.06 | 3725 |
| 409190 | AU076536 | Hs.50984 | sarcoma amplified sequence | 2.06 | 349 |
| 446163 | AA026880 | Hs.25252 | prolactin receptor | 2.06 | 3731 |
| 404029 | | | NM_018936*: Homo sapiens protocadherin be | 2.06 | 4718 50 |
| 437108 | AA434054 | Hs.80624 | hypothetical protein MGC2560 | 2.06 | 3034 |
| 452110 | T47667 | Hs.28005 | Homo sapiens cDNA FLJ11309 fis, clone PL | 2.05 | 4272 |
| 428753 | AW939252 | Hs.192927 | hypothetical protein FLJ20251 | 2.05 | 2291 |
| 427752 | AA470687 | Hs.104772 | ESTs | 2.05 | 2194 |
| 410976 | R36207 | Hs.25092 | hypothetical protein MGC10744 | 2.05 | 525 |
| 409960 | BE261944 | | hexokinase 1 | 2.05 | 422 |
| 452721 | AJ269529 | Hs.301871 | solute carrier family 37 (glycerol-3-pho | 2.05 | 4337 5761 |
| 446269 | AW263155 | Hs.14559 | hypothetical protein FLJ10540 | 2.05 | 3741 |
| 411761 | AI733848 | Hs.71935 | putative zinc finger protein from EUROIM | 2.05 | 574 |
| 420942 | H03514 | Hs.15589 | ESTs | 2.05 | 1467 |
| 408673 | BE208517 | | ribosomal protein L37a | 2.05 | 292 |
| 406709 | AI355761 | Hs.242463 | keratin 8 | 2.05 | 91 |
| 447128 | AI271898 | | cyclin K | 2.05 | 3825 |
| 449437 | AI702038 | Hs.100057 | Homo sapiens cDNA: FLJ22902 fis, clone K | 2.05 | 4061 |
| 416812 | H91010 | Hs.44940 | ESTs | 2.05 | 1025 |
| 404831 | | | C1002937*: gi\|7499208\|pir\|\|T20993 hypothe | 2.05 | |
| 408841 | AW438865 | Hs.256862 | ESTs | 2.05 | 312 |
| 410656 | BE161335 | Hs.321717 | ESTs, Weakly similar to S22765 heterogen | 2.05 | 501 |
| 418319 | AW611703 | Hs.190173 | ESTs, Weakly similar to A46010 X-linked | 2.05 | 1183 |
| 400249 | | | Eos Control | 2.05 | |
| 439092 | AA830149 | | gb: oc44f08.s1 NCI_CGAP_GCB1 Homo sapiens | 2.05 | 3185 |
| 448390 | AL035414 | Hs.21068 | hypothetical protein | 2.05 | 3963 |
| 440953 | AI683036 | Hs.124135 | Homo sapiens cDNA FLJ13051 fis, clone NT | 2.05 | 3321 |
| 427178 | AA398866 | Hs.97542 | Homo sapiens testis-development related | 2.05 | 2130 |
| 401463 | | | histone deacetylase 5 | 2.05 | |
| 453849 | N35321 | Hs.278611 | UDP-N-acetyl-alpha-D-galactosamine: polyp | 2.05 | 4436 |
| 426172 | AA371307 | Hs.125056 | ESTs | 2.05 | 2035 |
| 423871 | AA331906 | Hs.175596 | gb: EST35805 Embryo, 8 week I Homo sapien | 2.05 | 1783 |
| 418690 | AK000052 | Hs.87293 | hypothetical protein FLJ20045 | 2.05 | 1228 5026 |
| 423248 | AA380177 | Hs.125845 | ribulose-5-phosphate-3-epimerase | 2.05 | 1731 |
| 427356 | AW023482 | Hs.97849 | ESTs | 2.05 | 2147 |
| 435147 | AL133731 | Hs.4774 | Homo sapiens mRNA; cDNA DKFZp761C1712 (f | 2.05 | 2900 |
| 415025 | AW207091 | Hs.72307 | ESTs | 2.05 | 902 |
| 437763 | AA469369 | Hs.5831 | tissue inhibitor of metalloproteinase 1 | 2.05 | 3089 |
| 413916 | N49813 | Hs.75615 | apolipoprotein C-II | 2.05 | 763 |
| 452177 | AI863447 | Hs.268180 | gb: tz48f01.x1 NCI_CGAP_Brn52 Homo sapien | 2.05 | 4279 |
| 407590 | AI831258 | | ESTs | 2.05 | 171 |
| 431250 | BE264649 | Hs.251377 | taxol resistance associated gene 3 | 2.05 | 2544 |
| 430750 | AI650360 | Hs.100256 | ESTs | 2.05 | 2511 |
| 448296 | BE622756 | Hs.10949 | Homo sapiens cDNA FLJ14162 fis, clone NT | 2.05 | 3956 |
| 447211 | AL161961 | Hs.17767 | KIAA1554 protein | 2.05 | 3830 |
| 412939 | AW411491 | Hs.75069 | eukaryotic translation elongation factor | 2.05 | 684 |
| 420309 | AW043637 | Hs.21766 | ESTs, Weakly similar to ALU5_HUMAN ALU S | 2.04 | 1408 |
| 422321 | AA906427 | Hs.181035 | hypothetical protein MGC11296 | 2.04 | 1631 |
| 424287 | AL133105 | Hs.144633 | hypothetical protein DKFZp434F2322 | 2.04 | 1825 5208 |
| 432878 | BE386490 | Hs.279663 | Pirin | 2.04 | 2707 |
| 408113 | T82427 | Hs.194101 | Homo sapiens cDNA: FLJ20869 fis, clone A | 2.04 | 235 |
| 447973 | AB011169 | Hs.20141 | similar to S. cerevisiaeSSM4 | 2.04 | 3929 5704 |
| 410553 | AW016824 | Hs.272068 | hypothetical protein MGC14128 | 2.04 | 491 |
| 416990 | AF124145 | Hs.80731 | autocrine motility factor receptor | 2.04 | 1049 4975 |
| 451273 | NM_014811 | Hs.26163 | KIAA0649 gene product | 2.04 | 4206 5741 |
| 412507 | L36645 | Hs.73964 | EphA4 | 2.04 | 4880 639 |
| 433257 | AA613437 | Hs.302743 | hypothetical protein FLJ12543 | 2.04 | 2751 |
| 443823 | BE089782 | Hs.9877 | hypothetical protein | 2.04 | 3555 |
| 403532 | | | NM_024638: Homo sapiens hypothetical prot | 2.04 | 46 4715 |
| 437159 | AL050072 | Hs.306313 | Homo sapiens mRNA; cDNA DKFZp566E1346 (f | 2.03 | 3040 |
| 407813 | AL120247 | Hs.40109 | KIAA0872 protein | 2.03 | 200 |
| 440773 | AA352702 | Hs.37747 | Homo sapiens, Similar to RIKEN cDNA 2700 | 2.03 | 3318 |
| 424036 | AA770688 | | H2A histone family, member L | 2.03 | 1793 |
| 409463 | AI458165 | Hs.17296 | hypothetical protein MGC2376 | 2.03 | 375 |
| 445929 | AI089660 | Hs.323401 | dpy-30-like protein | 2.03 | 3714 |
| 452046 | AB018345 | Hs.27657 | KIAA0802 protein | 2.03 | 4266 5754 |
| 443347 | AI052543 | Hs.133244 | melanoma-derived leucine zipper, extra-n | 2.03 | 3519 |
| 405264 | | | NM_030813*: Homo sapiens suppressor of po | 2.03 | 4732 66 |
| 408756 | AA524743 | | ESTs | 2.03 | 303 |
| 417308 | H60720 | Hs.81892 | KIAA0101 gene product | 2.03 | 1079 |
| 416391 | AI878927 | Hs.79284 | mesoderm specific transcript (mouse) hom | 2.03 | 992 |
| 453055 | AW291436 | Hs.31917 | Homo sapiens, clone MGC: 9658, mRNA, comp | 2.03 | 4370 |
| 427484 | N32859 | Hs.37288 | nuclear receptor subfamily 1, group D, m | 2.03 | 2155 |
| 419852 | AW503756 | Hs.286184 | hypothetical protein dJ551D2.5 | 2.03 | 1363 |
| 432673 | AB028859 | Hs.278605 | DnaJ (Hsp40) homolog, subfamily B, membe | 2.03 | 2689 5510 |
| 424381 | AA285249 | Hs.146329 | protein kinase Chk2 (CHEK2) | 2.02 | 1838 |
| 443826 | AI214805 | Hs.27232 | ESTs | 2.02 | 3556 |
| 456258 | AW976410 | Hs.289069 | Homo sapiens clone FLB3411 PRO0852 mRNA, | 2.02 | 4535 |
| 418105 | AW937488 | Hs.246381 | ESTs, Weakly similar to FV1 MOUSE FRIEND | 2.02 | 1160 |
| 409445 | AW341217 | Hs.14139 | ESTs, Weakly similar to JC5314 CDC28/cdc | 2.02 | 373 |
| 437016 | AU076916 | Hs.5398 | guanine monphosphate synthetase | 2.02 | 3027 |
| 449230 | BE613348 | | melanoma cell adhesion molecule | 2.02 | 4049 |
| 424527 | AW138558 | Hs.334873 | ESTs, Weakly similar to I54374 gene NF2 | 2.02 | 1855 |
| 419239 | AA468183 | Hs.184598 | Homo sapiens cDNA: FLJ23241 fis, clone C | 2.02 | 1292 |
| 427982 | NM_016156 | Hs.181326 | KIAA1073 protein | 2.02 | 2210 5349 |
| 410855 | X97795 | Hs.66718 | RAD54 (S. cerevisiae)-like | 2.02 | 4858 518 |
| 437897 | AA770561 | Hs.146170 | hypothetical protein FLJ22969 | 2.01 | 3104 |
| 449000 | U69560 | Hs.3826 | kelch-like protein C3IP1 | 2.01 | 4025 |
| 437435 | AA249439 | Hs.27027 | hypothetical protein DKFZp762H1311 | 2.01 | 3065 |
| 421757 | Z20897 | Hs.296259 | paraoxonase 3 | 2.01 | 1559 |
| 436238 | AK002163 | Hs.301724 | hypothetical protein FLJ11301 | 2.01 | 2969 5577 |
| 436856 | AI469355 | Hs.127310 | ESTs | 2.01 | 3011 |
| 432026 | AA524545 | Hs.224630 | ESTs | 2.01 | 2627 |
| 407230 | AA157857 | Hs.182265 | keratin 19 | 2.01 | 139 |
| 447701 | BE619526 | Hs.272068 | hypothetical protein MGC14128 | 2.01 | 3893 |
| 418583 | AA604379 | Hs.86211 | hypothetical protein | 2.01 | 1214 |
| 408946 | AW854991 | Hs.255565 | ESTs | 2.01 | 318 |
| 419440 | AB020689 | Hs.90419 | KIAA0882 protein | 2.01 | 1313 5047 |
| 450983 | AA305384 | Hs.25740 | ERO1 (S. cerevisiae)-like | 2.01 | 4180 |
| 414825 | X06370 | Hs.77432 | epidermal growth factor receptor (avian | 2.01 | 4930 882 |
| 410701 | AF198620 | Hs.10283 | RNA binding motif protein 8A | 2.01 | 4854 508 |
| 407317 | AI204033 | Hs.30792 | ESTs, Weakly similar to I38022 hypotheti | 2.01 | 151 |
| 423551 | AA327598 | Hs.89633 | ESTs | 2.01 | 1757 |
| 400810 | | | NM_006560: Homo sapiens CUG triplet repea | 2.00 | 20 4691 |
| 407896 | D76435 | Hs.41154 | Zic family member 1 (odd-paired Drosophi | 2.00 | 213 4785 |
| 413129 | AF292100 | Hs.104613 | RP42 homolog | 2.00 | 4893 693 |
| 427871 | AW992405 | Hs.59622 | Homo sapiens, clone IMAGE: 3507281, mRNA, | 2.00 | 2202 |
| 444042 | NM_004915 | Hs.10237 | ATP-binding cassette, sub-family G (WHIT | 2.00 | 3570 5634 |
| 446770 | AV660309 | Hs.154986 | ESTs, Weakly similar to PLLP_HUMAN PLASM | 2.00 | 3782 |
| 414390 | BE281040 | | gb: 601156234F1 NIH_MGC_21 Homo sapiens c | 2.00 | 820 |
| 400074 | | | Eos Control | 2.00 | |
| 451684 | AF216751 | Hs.26813 | CDA14 | 2.00 | 4240 5747 |
| 451106 | BE382701 | Hs.25960 | N-MYC oncogene | 2.00 | 4193 |
| 419465 | AW500239 | Hs.21187 | Homo sapiens cDNA: FLJ23068 fis, clone L | 2.00 | 1316 |
| 409988 | N27687 | Hs.334334 | transcription factor AP-2 alpha (activat | 2.00 | 426 |
| 458422 | AI344782 | | DnaJ (Hsp40) homolog, subfamily C, membe | 2.00 | 4624 |
| 434636 | AA083764 | | hypothetical protein MGC3178 | 2.00 | 2856 |
| 442007 | AA301116 | Hs.142838 | nucleolar phosphoprotein Nopp34 | 2.00 | 3387 |
| 414569 | AF109298 | Hs.118258 | prostate cancer associated protein 1 | 2.00 | 845 |
| 441991 | AW844404 | Hs.126901 | Homo sapiens mRNA full length insert cDN | 2.00 | 3386 |
| 410025 | BE220489 | Hs.113592 | ESTs, Moderately similar to I54374 gene | 2.00 | 432 |
| 436961 | AW375974 | Hs.156704 | ESTs | 2.00 | 3023 |
| 411007 | AA311529 | Hs.67619 | hypothetical protein My014 | 2.00 | 527 |
| 421808 | AK000157 | Hs.108502 | hypothetical protein FLJ20150 | 2.00 | 1565 5122 |
| 450341 | N90956 | Hs.17230 | hypothetical protein FLJ22087 | 2.00 | 4131 |
| 446565 | D13757 | Hs.311 | phosphoribosyl pyrophosphate amidotransf | 2.00 | 3763 5671 |
| 449636 | AI656608 | Hs.281328 | ESTs, Weakly similar to T00378 KIAA0641 | 2.00 | 4071 |

[0368] TABLE 11B

| Pkey | CAT number | Accession |
|---|---|---|
| 429228 | 215430_1 | BG676155 BM009591 AI479075 AI025794 AI017967 AA448270 BE466812 AA853422 AI392649 BG952034 AA513384 BF840124 BE714620 |
| | | AW969605 AI553633 |
| 451807 | 17758_2 | BM479185 AL552795 AL577722 BF038888 BM127617 BF510346 AW450652 AA865478 AW449519 BM127314 AI806539 AW449522 |
| | | AA993634 AI827626 AA904788 |
| 421798 | 3042_4 | BC017829 AW276646 AI984209 AA663933 AA634104 AA551528 AA634041 AA298038 BG483990 T89297 BF853958 H64685 T90329 |
| | | T60644 T57747 BF852694 T92529 BG482852 BF883064 BF883066 N74880 AA829796 N90716 |
| 428342 | 6712_1 | AK056315 AI015524 AA724079 BI713619 AI377728 AW293682 AI928140 AI092404 AI085630 AA731340 BM469629 AW968804 AA425658 |
| | | AA769094 BF446026 AW118719 AI332765 AW500888 AW576556 AI859571 AW499664 AW614573 AW629495 AW505314 W74704 |
| | | AI356361 AI923640 AW070509 AI521500 AL042095 AA609309 AA761319 AI381489 H45700 AA761333 AW265424 AA909524 AA635311 AA649040 AI392620 Z40708 AI985564 |
| | | AW263513 AA913892 AI693486 AW263502 AI806164 AW291137 BI061872 BI059498 AA134476 AW084888 AA036967 AW370823 T55263 BI002756 AA489664 BF82726 W74741 |
| | | BF963166 |
| 400205 | 2538_1 | NM_006265 D38551 X98294 BM477931 BM461566 AU123557 AU133303 AU134649 AW500421 BM172439 AW500587 AW503665 |
| | | AW504355 AW503640 BM152454 AW505260 AI815984 AW504075 AW500716 AL597310 BC001229 BM474371 AA984202 AU135205 |
| | | BE090841 AW163750 BF747730 BF898637 AI206506 AV660870 AV692110 AW386830 AV656831 N84710 AW993470 BF086802 |
| | | BF758454 BG960772 BF757769 BI870853 BE018627 C75436 AW148744 BF757753 BG622067 BE909924 AA708208 BG530266 BF968015 |
| | | AW992930 BF888862 BG536628 AA143164 AW748953 BG498922 BF885190 BF889005 BF754781 BF800003 BM476529 AI627668 |
| | | AW028126 AL046011 BF590668 AI017447 AA579936 AI367597 AA699622 BE280597 AI124620 AI082548 AW274985 AA677870 AI056767 |
| | | BE551689 AA287642 H94499 AI752427 AI652365 AW002374 AW062651 AA360834 N68822 AU135442 AU125960 Z78334 BE545813 |
| | | AI092115 BF312771 BF242859 BG533616 BG533761 BG164745 BG492433 BM473183 AA172043 AA172069 AU157092 AU151353 |
| | | AU155318 BE302211 AI375022 AA085641 AU157923 H88858 AA132730 AA115113 AA909781 AI475256 AA424206 AW572383 AW084296 |
| | | AI184820 AI469178 AA782432 H92184 AA340562 BF195818 AA852821 AW576342 AA827107 AA173317 AW190014 AI918514 AA729372 |
| | | AA729718 AI055958 AA331424 BE328601 AA515690 BI018896 AW628277 AA748368 AA626222 BG492636 AW380620 BF800058 |
| | | AW370956 AA290909 R25857 BG952995 BF801437 AA172077 AU155890 AU149783 AI720904 AA902936 AA865727 AI470830 AV740677 |
| | | AA142982 AA482485 AU145485 AW576399 AU156042 R63448 BF246427 BE928472 D25910 BF758439 BF968785 BE565238 AA355981 |
| | | AI905607 BG291148 BG533096 BG532888 BF030886 BG613756 BE928471 BG574501 AA187596 AA361196 T95557 BG531446 |
| | | BG527242 BG527513 BG611106 AA085995 BF847252 BG024608 BE540261 BG531236 AL579993 BG108733 BG483503 BG571032 |
| | | BG492505 |
| 400291 | 1314911_1 | AA927862 AA401369 AI873274 |
| 443695 | 20416_12 | BE535598 AW204099 AW301249 AA609749 BF917914 AA775742 AV646137 AV646389 AA314747 |
| 437834 | 294580_1 | BG110129 AW749287 BE535498 AW749299 AW749293 AW749302 AW749298 AW749291 AW749294 AW749289 AW749288 AW749296 |
| | | AA769294 AW749297 AW749295 AW749292 BE002573 |
| 433023 | 3970_8 | BE999967 BF438599 AW864793 AI802899 BE815132 AW468888 AI672189 AI052004 BF112024 AA772335 AW275054 AA573845 |
| | | AI144148 AI968683 AA846676 AA927355 H80424 AW973295 R88209 F29868 BE928871 |
| 427365 | 1314911_1 | AA927862 AA401369 AI873274 |
| 415989 | 10194_1 | BC013389 BC017398 AI023543 AA191424 AI267700 AI469633 AW958465 AW953397 AA172056 BE940298 BF909208 BF909980 |
| | | BF095153 BG285837 AI720344 BF541715 AA355086 AA172236 |
| 458098 | 23945_1 | AI082245 BE467534 AI797130 BE467063 BE467767 BE218421 AI694996 BE327781 BE327407 BE833829 AA989054 AA459718 BE833855 |
| | | BE550224 AA832519 AF086393 AV733386 BE465409 N29245 W07677 AA482971 BE503548 H18151 AA461301 W79223 W74510 |
| | | AI090689 AL600773 AL600781 N46003 R28075 R34182 BE071550 AW885857 AI276145 AI276696 H97808 N20540 AI468553 |
| 412537 | 14066_1 | AK025201 AA425472 AI694282 BG057305 AA907787 AI286170 AI684577 AJ420494 AI809865 BF058095 AI478773 AI160445 AL044114 |
| | | AW665529 AI129239 AW297152 AI268215 AI469807 AI969353 BE552356 N66509 AA736741 AA382555 AW075811 AV759188 BI259364 |
| | | BF445142 BG232065 AI141758 AI631202 AI167566 AI208445 AA889823 BF982682 N90322 BI090882 BF208005 AW953918 AL044113 |
| | | AI016793 AA382556 AW235763 AA927051 AI862075 BE886691 BE619282 |
| 451752 | 10408_5 | AB032997 AI141678 AW978722 BE467119 AI761408 BF727385 AW237035 AI934521 BF436248 AI479668 Z40632 AA832081 AW295901 |
| | | BF057835 BE465977 AI621269 BE465983 BF756369 N74056 AI817896 AA716567 AA934774 H62600 H09497 BF943762 BE395335 |
| | | BE883333 |
| 444172 | 49300_2 | BF526827 AA513594 AL515291 AV648373 AV648176 AA916789 BF002906 AW469960 BE466943 AI367749 AI559715 BF431260 |
| | | AA937968 AI422252 AI288937 BF962778 AA909144 BF960004 BE671534 AI271719 BF925335 BE669504 BF433431 BF924838 AI218062 |
| | | AW960577 AV722716 BI859067 BF944964 BE147740 BF938993 |
| 452279 | 11990_1 | AF392454 AK023074 AI884890 AI814455 AW966220 BF736545 AA026021 AA286843 AA251918 BG197710 AA026294 AA337356 |
| | | BC010422 AK023226 NM_022776 BM459496 AA769310 AI826460 AU153650 AU160375 AW166211 AW292992 BF433538 AI823888 |
| | | AI684798 AI655985 AW770982 AI400454 AI276257 AA639510 AI689818 AW772604 AA807639 AU130298 AU132028 BF900889 BF904822 |
| | | AY007102 AU143256 BG621460 AA829630 AI864665 AI084922 AA025234 AI360060 AA766554 AA026295 AA825817 AA251762 |
| | | BE180751 BM464530 AV715833 AA779447 AI452519 AW418525 AA435643 D25894 AA435651 AA286844 N64369 AI702262 BG288063 |
| | | BE170545 BM466232 BE299160 AA169573 AL567428 BF217285 BE967276 |
| 400277 | 170_1 | Y00281 NM_002950 BC010839 BC007995 BG675232 BM468552 AL555484 BG831516 BF035300 BG677277 BF852972 BE314901 |
| | | BF850656 AI371816 AA292474 AA375747 AA308414 BM454544 BI333370 BM049921 BI461428 BI465007 BI223401 BE856245 AW821 164 |
| | | BF914775 BF914761 AU125835 BI222678 BI091137 BF340536 BM462798 BI224452 BG707915 AL569160 AA443815 AW572867 |
| | | AW363410 BF739268 BG010283 BI013120 BF818845 BF763468 AA305165 AI630370 AA039826 R24906 H02046 T96891 BF981330 |
| | | AW936510 AA478169 H04587 BG166574 BI869342 BE562482 BE539637 AA165089 AL579118 AL553699 BE044054 AW117440 AI520674 |
| | | BF435417 AW245648 AI952404 T29534 AU153459 AU152168 AW591591 AU146918 AI393187 AA478013 AU148143 AI224471 AI640728 |
| | | AI871537 AW264752 N93787 AI189357 AV756134 AI471659 AU147466 AA779206 AU149419 AU149104 AU159135 AA312221 AW445119 |
| | | AW021912 AI799771 F04407 AI285530 AI914643 AW068751 AA513325 AA164627 AA639285 AA569644 T96892 AI923594 BF439180 |
| | | BI770936 BF032438 AU154884 AA682793 AW072992 AU158815 AI884444 AL048031 AU158922 AU152546 AI695187 AL048033 AI245650 |
| | | AU148507 AW467451 BE536868 BF913001 BF062707 AL573082 AW067993 AA523354 BE886727 AI890705 AU159092 AI982693 |
| | | AI817553 AA236729 AI687858 BG163767 AI524675 AI678155 AA127100 AI762661 AU159718 AI469720 AA483627 AW131696 R26868 AI199885 AW875614 AW938694 |
| | | AW578974 BI763988 BG819168 BE874767 BG978292 BE162948 AL555483 AW189719 T56783 AI018819 |
| | | AI476552 BI492837 AI824440 BG996262 AA932887 AI380726 R79530 AA622108 AI262575 T56782 R27437 BE784153 AW129549 |
| | | AI675567 AI866759 BG987935 |
| 446999 | 70312_1 | AA151520 AI749635 AA149436 BE172702 AW317084 AA922501 AI302818 AI147563 AA789216 AI719336 AW612978 F34536 AI971386 |
| | | AI246525 AI183312 R02554 AI360172 AA634282 AI022935 AA639461 AI086411 AI087086 AA633082 AI590029 AA856582 AW369734 |
| | | AA150042 AA877171 AA456459 AI078529 R83333 AI161298 AA056987 AI350120 H88127 AA258759 AI673598 AA454566 AI342790 |
| | | AI492606 AI159945 AI198009 AI198039 AI142751 AI141403 T81478 AW014110 AI197808 AI927796 AA534936 AA649735 AA649697 |
| | | AI349452 AA719660 AW954285 |
| 418304 | 1093209_1 | BE883520 BI057842 AA215702 AA215703 AA368006 BE006876 BE066555 |
| 438869 | 52134_1 | AF075009 R63109 R63068 |
| 406685 | 0_0 | M18728 |
| 443687 | 1347_10 | H72674 BG925294 AA699932 BF061529 AI240821 AA676904 AI083582 AA766036 AA761066 AA761228 AV686983 AV646138 AV646121 |
| | | AW961968 AA004250 AV658573 T08315 AA004669 |
| 453160 | 6028_5 | BC009612 NM_003526 BI597616 AV761592 AV760377 AL601008 BI604131 BE645918 BG187760 BG181525 BG210634 BG192999 |
| | | AI263307 AA344186 AW952966 AA033609 AA037562 AA722183 R79452 H70775 BF674991 BE769437 BG007856 AA037483 AW572535 |
| | | AI143991 AA084581 AA033610 AV742510 AV735788 R08336 |
| 438118 | 1007899_1 | AA778411 AW663081 AW753311 |
| 447349 | 1063443_1 | BE743847 AW809603 BM469626 AI375546 |
| 438714 | 2576235_1 | AA814859 AI582623 AA814857 |
| 454453 | 8582_4 | BF313069 BE879305 AW752781 AW752727 AW752559 AW752578 AW752584 BF846118 AL545903 BF846115 AL525361 |
| 441128 | 20932_1 | BC014072 BE328850 AI356567 AI148171 AI022165 BG149661 BF000671 AA233101 AA573721 AA447991 AW016855 AI005068 AA554071 |
| | | BF478215 AA906902 AW014761 BE905651 BE512923 BM047129 AA243852 AA232991 AA127550 AA127551 AA570256 AI473237 |
| | | BF033706 N90525 AW973623 AI359627 BG674574 BE903322 |
| 411605 | 10026_3 | BG256892 H10532 N46614 R52610 AW977696 BM460488 W56819 BI042183 BG977498 BE767451 BF870009 BG477472 R61137 R14274 |
| | | R20259 R09686 BI838226 BF034269 AA429173 BE741829 AW867495 AI123683 AW006831 BE831162 AW452753 AV742717 W86152 |
| | | BF115102 AI633815 BF921562 AA094230 BE092587 W86151 AA526153 AI672156 BF914496 R12579 BF852352 AA699780 T57386 |
| | | BF903022 R09933 AA678298 |
| 427521 | 513212_1 | AW973352 BF222929 AW016853 BF059130 AI651829 BE551767 AA558414 AI339359 BF059601 AI961162 AI341422 AI206248 AI206165 |
| | | AA548736 AA768578 AI539081 AW025957 AA736837 N79575 AW594357 AA480892 |
| 400247 | 2764_1 | BC022339 BC009610 BC010537 X79805 NM_006713 U12979 BM467814 BM450743 AU132951 AU137129 BG493425 AV758819 |
| | | BG708412 BG705885 BG702217 AV716638 BG777009 BI545689 BI552153 BM476712 BG770858 BG527656 BG528277 BG391388 |
| | | AV716861 BI602926 BG290073 BI667399 BM451469 BI667173 BI602139 BG532171 BI669216 BI544727 BG721852 AV716503 AV701327 |
| | | BM090738 BI492000 AI308856 BI544904 AL599813 AV715829 AV716505 AV714587 AV717902 BF668072 AV716385 BI461927 BM090954 |
| | | AV717826 BG503676 AV647719 BG501392 BG428433 BE895629 BM313117 AW021050 BG435032 BM152910 AA313503 AA872377 |
| | | BG574714 AV712054 AV732696 AA252476 AV712759 AL599643 BE790872 BG654930 W73337 AW675377 AV760376 AV725139 |
| | | AV716379 AA887165 BE830003 AW023796 AL599291 AI902948 BG944042 F00781 AA352483 BG217897 N33888 AW581924 BG654730 |
| | | D31410 AA353088 D31288 AA295029 H95170 BE935104 AU139980 BG772963 BG776470 BG532512 BG105449 BI545421 AV715456 AW386083 BG699714 AL535832 AL514940 |
| | | BG190861 BG210593 AW999254 H95138 AA353863 BE764809 N50375 BE091363 BG701255 |
| | | BI860846 BI832485 BG168150 BG028647 BE546301 BG900321 BI909737 BG702363 BG614141 BG611137 BG700121 BF031492 N85802 |
| | | AV715940 N51590 BG993478 BE172016 AW893622 |
| 413413 | 26025_3 | BG261240 BG231707 AI440201 BF540868 BF240794 BE779394 BG505096 AA129208 D82298 T10758 AU155599 BF857123 BF836348 |
| 429978 | 35194_2 | BE738425 BE738323 BM126944 AW629678 AW265195 AI916735 AI394255 AI573090 AI354442 AW612857 AI339558 AI919424 AI377532 |
| | | AI354441 AI308821 AA772275 AW055215 AI589705 AI336532 AA806547 AV682125 H93575 AW071172 AW769904 AI863985 AW265018 |
| | | AW196655 D79662 BE042393 N75017 AW014741 C75509 BE748621 H92431 AW079261 AW901780 AA329482 AW960115 BI260621 |
| | | AI767525 R31663 BI918664 AW963196 C06195 AI678018 |
| 410507 | 4450_2 | AK027433 AF117064 NM_013319 BC004468 AI149901 AI150093 AI374696 AI566580 AA779898 BG696067 BG828923 BM051241 |
| | | BM050350 AL580560 AL558826 BG182261 BG194259 BG194258 BF036155 AI026803 AI024570 AA702281 AI566953 AW662600 |
| | | AA463546 F33147 AA357796 BE312357 AL516788 AW958856 BE730432 H85868 AA046292 BG478025 BG112231 BG763623 AA098922 |
| | | BI093481 BE746381 AW962126 AI040821 BG026983 AA355288 BE392859 AA085571 BF875433 BF316280 BG740116 BG166624 |
| 441102 | 25369_9 | AK054859 AA973905 AI299888 H63235 AA917019 AV722171 BE514107 BM051585 BE513744 BE295938 W32901 AA649212 |
| 439574 | 689966_1 | BG532820 AW246001 AI469788 AI350090 AI446788 BE549330 W84862 AA837988 |
| 407242 | | |
| 450375 | 16559_3 | BG570706 BG572749 AW606284 H04021 AA151166 AW954405 AA131254 BG056461 W46291 H01532 H04384 H03231 AA852876 |
| | | H04410 H59605 BE157601 AA113758 |
| 432908 | 452541_1 | AF150424 AI861896 AA570057 AV738855 |
| 442643 | 2736_1 | BC001588 BC007424 AF016369 NM_004697 BI756186 BE257019 BG500792 BI862776 AL121371 BG574833 AA703250 AA179511 |
| | | AW052006 AI280150 AI914000 AI358319 AI081204 AI082594 AA992449 AI470821 AI655744 AW237529 AA678858 AI984430 BF433055 |
| | | BE467594 BE467573 AA035630 AI289987 AI184802 AI681391 AW592416 AI138377 AI139266 AA961714 AI800163 AA418751 AW451928 |
| | | AA668676 AI273444 AI494387 BE046912 AI276555 BF196021 AA700055 AA609305 AA772596 AI635758 AI635749 H95459 AW610290 |
| | | BE464994 AA527136 BF374802 AI800175 AW195227 AI189676 BF802049 AL513632 AL554911 AL538845 BE297273 AA315321 |
| | | BM451920 BE269268 BE292835 BE018128 BG755713 BM041095 BG677009 AL039691 BF995709 BE735586 BE296453 BG393609 |
| | | BG824453 AL567522 AI745257 AW388641 AW301265 AI141144 AW029280 AU149362 AU152328 AA418960 AL121009 AI890398 |
| | | AL528748 H13050 T47086 BI000575 BF334914 BF109661 R44450 H13259 T47087 AW388646 BF305834 AL577515 BM041600 BE889299 |
| | | BF239768 |
| 419544 | 236329_1 | BE787623 AI909153 AW362351 AW362269 AW362245 AA526337 AA244193 BF876842 R79395 AI909154 |
| 455286 | 1149378_1 | W27935 AW887403 AW887474 BE144384 BE144386 |
| 400240 | 27222_1 | U04209 NM_005926 AU121948 BI089933 BG425282 BG686931 AW821182 AU100079 BF700972 AL565099 BG116731 BG200436 |
| | | AL555789 AL047536 BF197395 BE504960 AI304957 AA932419 AW575886 AI916292 BI033772 BG995988 AL570315 BE348695 AA331214 |
| | | AL514367 AA436797 AU134683 AL533163 BE818949 BE818946 BE818920 AU136916 AL047535 BG424079 BE294696 AU135607 |
| | | BE207326 AL514368 AA318042 BF831066 BG106341 AW865170 BE937045 AI828674 BM083453 BE385535 AW865372 BF350485 AW382531 R01323 AA092464 |
| 455290 | 1151240_1 | U75810 AW890252 |
| 449570 | 79253_1 | AA001793 AA001871 |
| 448663 | 16112_4 | BE966763 AA659765 AI961656 AI520918 AA761743 AA281477 N66431 BE463652 AA281329 AW272944 AA058687 BM145087 AA045516 |
| | | AW341820 AA112515 AA258766 AI886639 AA714133 AA768245 AA035533 AI630459 T20165 AW971268 BE966269 AA522722 |
| 433009 | 2142268_1 | AA761668 AA573621 R09670 R92814 |
| 447197 | 2176805_1 | R36075 R36167 AI366546 |
| 432586 | 6633_1 | BC022881 AU150944 BG750783 AW754175 AW857737 AI911659 AI050036 AA554053 AI826259 AA568548 |
| 449444 | 2735_1 | U59185 NM_004696 AV734324 AI245349 AA369517 H88760 D79128 AA970406 H01059 H88761 H03446 BG620383 AU135008 AU136895 |
| | | AU158158 AU155762 R73608 R65751 R23756 N74630 AW078687 BE439761 BE786351 R68994 BE785867 AW297502 AW297553 |
| | | BG431545 AW814843 BF382644 BG429539 BE929862 BF811258 |
| 438578 | 2573130_1 | AA811244 AI373188 AI240509 |
| 441318 | 1989216_1 | AA928233 AI078234 AI702558 H81727 |
| 442961 | 60316_2 | BE966247 BE220885 BE467384 BE350135 BE672094 AI811582 AW665254 AA772731 AI283601 AA417067 AW197746 AI868357 |
| | | AI792143 AA931120 AI758506 AA843761 BE737582 AW379586 N38812 BG567321 H13257 |
| 450251 | 40382_4 | BE080483 AI689298 BE080416 |
| 422150 | 782_1 | BI086421 BF059136 AW003898 BF446659 AI632891 AI628067 AI703179 AI961149 BF111022 AW614154 BE674215 AA687350 AA779426 |
| | | BF591963 AW243344 AI356530 AI492508 AI694049 AI090422 AA465307 AI273387 BE674625 AW271971 AA969153 AW468593 AA984014 |
| | | AI817491 AA970258 AI914450 AI018697 AW577591 AW577616 AA382101 AW954455 AI867266 AI707995 AI337384 BF208406 BF037100 |
| | | BF223433 BF195517 BE673984 BF224124 BE813387 BG036579 BI553906 AA304995 AW361269 AW754160 AW361276 AW361271 |
| | | AI867118 AW805555 AW361284 AW954458 AW958551 BG681507 H79011 AW205696 AW134957 AA747667 AW753296 BF939060 |
| | | AW958549 BF910827 BG573750 BG168639 |
| 418330 | 36528_1 | AK056357 BG704214 BG714527 BE409405 BE514455 BE408705 BM351826 BM049253 BM352137 AI659121 AW074357 AI674368 |
| | | AW207841 BE646201 BM453984 BE674342 H19667 AI458175 AA279585 AW438632 AI687141 AA433999 AI245284 AA366782 AI948491 |
| | | AW450917 AW450396 AI949813 BE217772 BE504863 AI628938 BF059575 AI564121 AI073854 AW510570 AI769861 AW235541 |
| | | AW771224 AW236106 AW074675 AI919535 AA977064 AI364994 AI631614 W58249 AI034276 BE169956 AA743584 H19668 AI222131 |
| | | AA883261 AI351534 F10472 AW466882 AA814964 W58250 BF036304 BF932025 BM474362 BG110744 AW964083 AW369992 F12868 BF842785 AA356665 BI091945 BG059147 |
| | | W04844 R18398 BE925184 BI050068 BI825078 BE784883 AW175845 AA216130 BI257636 |
| | | AA504328 AA713664 BF754840 AW235144 R38555 R42461 BG676504 T75135 R15365 BM012684 |
| 454645 | 1065291_1 | AW811928 AW811887 AW811948 AW811847 |
| 455540 | 430605_1 | AW993000 AV720038 AV720142 AW993293 BE080231 AW993284 |
| 424339 | 50559_1 | NM_015720 AF219137 AL534420 AL524055 AL537346 AL538442 BG765888 AL530054 AL525377 BG474596 BG473144 BE251553 |
| | | BG706099 AL538039 BG703131 BE255806 BF805256 F12128 AL566773 BI828686 BF761480 AI204971 BG818818 BI199246 AL534816 |
| | | BF529941 AA324163 AL523285 BG914330 H07952 AL534815 BE769903 AI867802 BM310135 AL533702 BE254484 BF528852 BE867462 |
| | | BE740130 AL134164 AL567115 AL533701 AL524054 AL515904 AL523284 AL568203 AL534419 BF981162 BE257148 AL561833 |
| 408839 | 234669_1 | AI355222 BF378422 AA366587 BF874552 AW277084 R26970 D79194 R27662 |
| 414883 | 8371_2 | AF274943 BG494894 AI719075 AA908783 AI935150 AI422691 AA910644 AA583187 BM272167 AI828996 AA527373 AW972459 AI831360 |
| | | AA772418 AI033892 AA100926 AU154749 AI459432 AI423513 AI094597 AA740817 AI991988 AI090262 AI312104 BI256707 AA459522 |
| | | AA416871 AI075239 AI339996 AA701623 AI139549 AI336880 AA633648 AI989380 AI362835 AA399239 AI146955 BF514270 N92892 |
| | | AI348243 AI278887 AA459292 AI494230 BF507531 AI492600 AA962596 AW613002 AA293140 AA235549 BF108854 AA954344 N49682 |
| | | AI457100 AW589407 AW300758 BE220715 BE220698 BE569091 BM009647 BF900351 AI537692 AI203723 AI857576 AA584410 |
| | | AW371667 BM172363 |
| 453454 | 2736_1 | BC001588 BC007424 AF016369 NM_004697 BI756186 BE257019 BG500792 BI862776 AL121371 BG574833 AA703250 AA179511 |
| | | AW052006 AI280150 AI914000 AI358319 AI081204 AI082594 AA992449 AI470821 AI655744 AW237529 AA678858 AI984430 BF433055 |
| | | BE467594 BE467573 AA035630 AI289987 AI184802 AI681391 AW592416 AI138377 AI139266 AA961714 AI800163 AA418751 AW451928 |
| | | AA668676 AI273444 AI494387 BE046912 AI276555 BF196021 AA700055 AA609305 AA772596 AI635758 AI635749 H95459 AW610290 |
| | | BE464994 AA527136 BF374802 AI800175 AW195227 AI189676 BF802049 AL513632 AL554911 AL538845 BE297273 AA315321 |
| | | BM451920 BE269268 BE292835 BE018128 BG755713 BM041095 BG677009 AL039691 BF995709 BE735586 BE296453 BG393609 |
| | | BG824453 AL567522 AI745257 AW388641 AW301265 AI141144 AW029280 AU149362 AU152328 AA418960 AL121009 AI890398 AL528748 H13050 T47086 BI000575 BF334914 |
| | | BF109661 R44450 H13259 T47087 AW388646 BF305834 AL577515 BM041600 BE889299 BF239768 |
| 429588 | 1396089_1 | AI092511 AI080271 AA455177 AI381859 AI381721 |
| 412452 | 71091_1 | BE796667 BF330981 BE394193 Z45547 BG490525 F35734 AA130708 AA577072 AA446587 AA215665 AA978209 BG740729 BG746810 |
| | | BE298184 AI356291 AI671975 AI818924 AV715722 AI078381 BI142391 AI201085 AI198283 AI077572 AI694848 AW016425 BM456416 |
| | | AI277223 AW771476 F26140 AA102778 AW025780 R44726 AA761079 AI581346 AI991909 BM005939 BE537999 BG469717 AA114156 |
| | | BF437200 BE774942 |
| 415889 | 12922_1 | NM_052918 AF284756 BE019093 Z42986 BE328250 BE207835 R54516 R24563 H08127 BI522616 AA551620 H07879 AI174481 BF941262 |
| | | BF222810 R54417 AW137766 AI638502 N22373 H08128 R44366 AW272405 AI675836 Z38786 N75618 F02463 AI654047 BI492031 |
| | | AW021081 |
| 442092 | 22756_2 | BM449821 BM069895 BM023170 AW025563 BG152606 BM023452 AI862106 BG959957 |
| 459376 | 31010_1 | BC002465 BE254864 BG472164 BE258770 |
| 410723 | 6090_25 | AW070415 AA628250 AW204027 AI936167 AW054868 BF805308 AA100683 AA088786 |
| 429462 | 5761_2 | BC008352 BM006782 AW245715 AI890356 BF445407 BE222242 AW139455 BE549685 AA987521 AA960934 AW245359 AA453285 |
| | | AA976507 BG055359 BM007094 |
| 424399 | 2196_1 | NM_058173 AF414087 W72837 BF742809 AW070916 BE092421 AI905687 AA340069 BE074512 AI905623 AI905633 BG202312 W72838 |
| | | AI139456 BG218084 BE926938 BE186013 AW176044 AW291950 BG185269 BG197186 BG192597 BG183176 BG207535 AI127172 |
| | | BE815819 AI905624 R75793 BG202313 AI905837 BE815853 |
| 440282 | 21425_1 | NM_021188 U90919 BM458077 BG214941 AL562127 BG197712 AW994207 AA043114 AW993474 AA631832 AI911529 BI001014 |
| | | BE156322 BG319454 H27376 BG220618 BG189474 BG325006 AL519085 BM472894 AL520560 BG575806 AA319317 BG621802 |
| | | BG912722 AV760869 AV760871 R13243 BE274097 BG327062 BI765172 BE614338 BG214923 BM153391 AU147675 N58119 AL043557 |
| | | AL043558 AL043510 AA773474 AU148079 BF062869 AW189972 AW250398 AI028605 AI434688 AW149344 AI246783 AI961376 AI698209 |
| | | AA251535 AU160747 AA579811 AI572570 AI656228 AA426093 AA127171 BF222487 AA725576 F21161 AI932217 BF222251 AI024660 |
| | | AA780998 AI538862 AW140038 AI122909 AA493515 AA401920 Z39789 F10942 F05081 AA814868 F10376 AA776314 AA993104 T94991 |
| | | AW583990 AA128211 F03074 AL579261 AL519084 AA384895 BG196670 AW083526 BF220181 BE669988 BF907279 T23499 AL520559 |
| | | AU149005 N38766 H96506 AA040865 AI263737 AA723350 AI168145 AA652386 AI374699 AA487377 AI927374 AI985531 AI352105 |
| | | AI040092 AA486562 BM053020 Z41738 BE243710 AA601558 BM052743 AI445827 AA487260 AI982679 AW130546 AI743384 AI335647 AW978172 R40324 AV736436 |
| | | BE966360 AI185467 AI367193 N75025 AW131068 BE940519 H43910 AA486659 BE614365 BF220261 |
| | | BE181357 BG189473 BG210176 H43958 |
| 412988 | 1342150_1 | BE046680 BE046738 BE044958 |
| 435542 | 132718_1 | AW975503 BE763276 H74234 AA687376 |
| 418647 | 243680_1 | AA226513 AA383773 AA226198 |
| 424765 | 6857_1 | AK021881 AU145974 AU145787 C16964 AA428211 AU119698 AA993264 BF999192 AW903017 AA346559 AU119446 AW581679 |
| | | AA991677 AW898165 AW386878 AW890957 Z18340 |
| 439306 | 3941_3 | BM013864 AI905414 AF086118 BE178507 AW161170 BE220199 BE221405 W01813 BG150053 N70760 N26062 H98499 AI290198 |
| | | T80987 BE549149 BG106008 AW662681 AI590833 T71977 |
| 422405 | 17366_3 | AW006867 AI373549 AA310278 |
| 400203 | 11774_1 | NM_002794 D26599 BM469989 BF305151 BG821966 BI089030 AW007738 BI222910 BM049422 BG028749 AI189162 AI831230 |
| | | AW131497 BM272215 BE791105 AW778828 AA479594 AA480133 AA131997 AA284572 AA453009 BF928258 AA152127 AA393918 |
| | | BF765307 BE247542 BF934697 BF341798 BE253409 AA470620 AI828932 AW379902 AV762678 AV741784 AV760892 AI025755 |
| | | AA878562 AA630630 AA761708 AA862518 AA865831 AA862947 N53065 AA131821 AA293499 N23342 N26856 AI147346 AW951549 |
| | | AA772963 BE245986 BG208493 AI831666 BG474873 BI023168 AU149647 BG197069 BG191102 BF304178 BE536135 AA706900 |
| | | AA443583 AI002710 AW276192 AU149842 BG214797 BG198193 AW197923 AW627799 T98663 BG194788 BG214656 BF345258 |
| | | BG716363 AI066528 BI546220 AA393815 AA132004 AA353826 H97858 BG187823 BF841463 AI351714 AV735966 BG196439 BG216840 |
| | | BG198438 BG400762 |
| 412700 | 18692_7 | BG164322 BF510268 AI681542 BE222433 AI299965 BE220552 AA115728 BE896438 |
| 406740 | 0_0 | AA577274 AA908437 |
| 442481 | 678752_1 | BG398943 N99828 AI110738 AF074645 BE969969 BE079873 BF185244 |
| 430677 | 11749_1 | NM_001943 Z26317 BG750290 BM043721 AW361908 BG494570 AW996792 BF915903 AW753487 BI335109 BE018413 BE874074 |
| | | BF333555 BI016581 BI014002 BI015917 BE731644 BE927177 BE697899 BF999996 BF929423 BG951608 AW858747 AW858755 |
| | | AW858750 AW858749 AW858751 AW363742 D58979 BE003946 AW858999 BG951830 AW859003 BF738953 AW369461 AW363740 |
| | | AW998641 BG978975 BG015802 AW991316 |
| 453331 | 16559_1 | BG571303 AA410586 AA035018 BG572117 BG620022 AA147247 BG005785 BG014448 R31981 H02668 H12498 R36203 BF992089 |
| | | R73999 T49904 R75732 BI057974 T53681 AA147933 N50695 R68588 R25671 R31935 R25110 R36105 AK055628 BE157467 AW663674 |
| | | AA190993 H01642 BF510304 AA626915 AA746952 AI161014 AA099554 BG572534 AI803329 AI809932 AI808765 AA411449 AI378760 |
| | | AA976929 AI378620 AA909684 R75632 AI360919 AI350463 AW069127 AA411621 AA742532 H12451 BE208298 H03612 H12839 N58781 |
| | | R75957 BF996484 AI240665 BF989591 BI056086 BG001590 BF107035 |
| 409960 | 39576_1 | BE644758 AI082238 BF940027 AI201079 AI436035 AW275966 AI085394 AI291655 AW070441 AI474134 AI268978 AI769279 AI567682 |
| | | AA693941 BF477668 AW664149 AA283782 BF509538 AW296868 AI268977 AI168133 BM352065 AI262769 BF941976 AI056920 |
| | | AA481861 BF763697 AL565888 BM352383 AA427768 AA385346 AI186988 AA931831 AA134972 BF217480 BF111012 AA908246 |
| | | AA319849 AA318136 AL514271 BF364291 AL515057 AV702312 AA377395 AL544217 AI341000 AW193583 AI350789 AA888338 |
| | | BF945380 AW879092 AA130839 T91066 N92326 AI004389 AA078832 AL572370 W04622 BE314003 AW960808 BM360872 AA319160 |
| | | AA130778 AL514257 |
| 408673 | 13031_1 | BG027435 BF746745 AF349017 NM_052963 AL553524 AL519055 AL525199 AL529016 BE208517 BI856042 BG480978 BE267120 |
| | | AW815679 AL525198 AL561760 AA933030 AA634332 AA568280 AA927487 AW182340 AW592604 AW732157 AI680072 AI431328 |
| | | AI357601 AI872335 AI032112 D25780 AL529015 AL576497 AA575842 BG223081 AA618007 BF310845 BF757605 BM012536 BI911537 |
| | | BE964237 |
| 447128 | 11028_3 | BG292064 AI452509 AI271898 BE048502 BI966153 X84721 AI858001 BM021943 AI553937 AI765259 F25787 AW015380 AA554539 |
| | | AW059537 F35749 AA149853 AA961610 AI568815 AW973696 C00201 R77127 BG438065 AI244810 H00719 |
| 400249 | 993_1 | BG260581 AI743827 AA182444 AA927609 NM_001326 U15782 BC010533 AA779834 AI086366 AI452475 AW274511 BG056719 |
| | | AW026350 AA808891 AW080007 AI763436 AU154714 AU155464 BF196839 AI934353 AI376072 BG232033 AI040445 AA700556 |
| | | AW004704 BE047781 AA470756 AI091381 AI302228 AI400050 AI142702 AA614554 AI467907 AA282801 AI434140 AI357496 AA748501 |
| | | AA430113 BF060907 AW207004 AI367341 AA873520 AA764823 AI077410 AA253061 AI052369 F08358 BM456285 BI518533 BI836074 AU133365 AU131081 AU127466 |
| | | AA173834 AW999116 BG571523 AU100072 BG290403 AI743461 W90141 D58551 AA181551 AA094014 BG724183 |
| 439092 | 919640_1 | AW978407 AA830149 M85983 AW503637 BF352096 |
| 407590 | 78212_1 | BE293321 AA631602 AA281584 AA927393 AI831258 AA340072 BG009209 AW956385 AW838390 N94346 BF724763 AW082728 |
| | | BE044419 AI417373 W69444 AI147614 AA632403 AI937606 AI864878 AI969211 AI081135 AA885000 AA926984 AA642586 AW079405 |
| | | AA973001 AW628858 AI521070 BG912959 BI052498 |
| 424036 | 6226_1 | NM_033445 BC001193 AI885781 BF794032 AA476620 AA810906 AA810905 AI291244 AI885097 AI359708 AI335629 H97396 AI344589 |
| | | AA300377 AA457566 AW771833 BE465621 AI364068 AI364452 AI648505 AI918342 AI928670 AA886580 AI531029 AA886344 AI186419 |
| | | BG329096 BM045465 AL531028 BG437151 BE868021 AA179427 |
| 408756 | MH1740_17 | AA524743 BF515403 BM353526 AI803357 BF000688 AW665479 AI672715 AW150325 AW589318 AI693038 AI370572 AI167636 |
| | | AA057236 AW439079 AI097376 AI382060 AI684871 AI684860 AA913419 AA806162 AI673426 BI324967 BM149631 BM145789 BM353796 |
| | | AA913878 BM148707 N38884 BI761934 BM145978 BE243268 BE246569 N38883 |
| 449230 | 6182_6 | BC006329 AK026224 BG105365 AI472084 AW074277 AI743908 BM309990 BI850432 AI094365 AI539568 AW779999 AI261365 AA988975 |
| | | AI436272 AI559886 BI710742 AA988508 AA036678 AI867147 AW518513 AI620019 BE645777 AI801919 AW205320 AI457722 BF061996 |
| | | BF061798 AA233854 AA232795 AA516294 AA830561 R74220 BG768337 AW392972 BE764979 BE257665 |
| 414390 | 2128_2 | BC022204 AK027690 NM_032839 BI765386 BE903404 BG700172 BF701671 BG252600 W60255 AW301576 W01296 AV724003 |
| | | BE999965 AI949788 BM040799 Z43693 BF082768 BF328302 H09192 BF332781 R34999 BG573394 N57281 BE009522 BE281040 |
| 458422 | 4340_3 | NM_006260 BE048475 AW080036 AA287317 AA400028 AI204437 AI830642 AA644420 AW614662 AW261942 U28424 BG335330 |
| | | AU148480 AI095508 BF727387 BG256497 AI521859 AW291686 AW007816 BG002833 AA853075 AA779079 BF082050 AI640393 |
| | | AA522954 T55310 AW517649 AA127463 AA887984 AW206341 BE858004 AW772531 AA604169 H83777 BG290990 AI692188 AI223311 |
| | | AI708839 D82262 AA600260 AI364786 AA471007 |
| 434636 | 15423_1 | AJ420454 AF147430 AA910497 BF432963 AI701451 AI743089 AA429326 AI887812 AA315932 AI005464 AL043321 AI300993 AA425105 |
| | | BE467230 BE669770 AA885637 BE503044 AW014324 AI809584 AW167510 AA921331 AA903224 W01644 AI762128 AA031404 BE550653 |
| | | AI694045 BE043088 BE670430 AI630969 AI457315 BE644737 BE327316 AW295247 N92784 AI630807 BE328180 AI269949 AW245292 |
| | | AA083765 AA256898 AI375535 AA430673 AI168735 AI589717 AA015942 AI693885 AW341205 AA931651 BF856764 BE468094 BF433393 |
| | | BF445511 AA928976 AI817684 BF111008 AA428316 AA455858 N25716 AA568727 AI581817 AA427482 H40678 AA041483 N71630 |
| | | H51826 BF969052 AA094470 AI560352 T98937 W52816 AA083764 |

Pkey: Unique Eos probeset identifier number
CAT number: Gene cluster number
Accession: Genbank accession numbers

[0369] TABLE 11C

| Pkey | Ref | Strand | Nt_position |
|---|---|---|---|
| 405770 | 2735037 | Plus | 61057-62075 |
| 404561 | 9795980 | Minus | 69039-70100 |
| 401451 | 6634068 | Minus | 119926-121272 |
| 401519 | 6649315 | Plus | 157315-157950 |
| 401866 | 8018106 | Plus | 73126-73623 |
| 403485 | 9966528 | Plus | 2889-3001, 3198-3532, |
| | | | 3655-4117 |
| 401464 | 6682291 | Minus | 170688-170834 |
| 404996 | 6007890 | Plus | 37999-38145, 38652-38998, |
| | | | 39727-39872, 4055 |
| 402802 | 3287156 | Minus | 53242-53432 |
| 402408 | 9796239 | Minus | 110326-110491 |
| 401558 | 7139678 | Plus | 103510-104090 |
| 404632 | 9796668 | Plus | 45096-45229 |
| 404571 | 7249169 | Minus | 112450-112648 |
| 405558 | 1621110 | Plus | 4502-4644, 5983-6083 |
| 406081 | 9123861 | Minus | 38115-38691 |
| 402496 | 9797769 | Minus | 8615-9103 |
| 403011 | 6693597 | Minus | 3468-3623 |
| 401203 | 9743387 | Minus | 172961-173056, 173868-173928 |
| 404440 | 7528051 | Plus | 80430-81581 |
| 401435 | 8217934 | Minus | 54508-55233 |
| 406581 | 7711879 | Minus | 12694-12852 |
| 404607 | 7328770 | Plus | 28477-28591 |
| 401093 | 8516137 | Minus | 22335-23166 |
| 405366 | 2182280 | Plus | 22478-22632 |
| 404819 | 4678240 | Plus | 16223-16319, 16427-16513, |
| | | | 16736-16859, 1694 |
| 400880 | 9931121 | Plus | 29235-29336, 36363-36580 |
| 401197 | 9719705 | Plus | 176341-176452 |
| 404580 | 6539738 | Minus | 240588-241589 |
| 402102 | 8117771 | Minus | 174566-174740 |
| 402812 | 6010110 | Plus | 25026-25091, 25844-25920 |
| 402855 | 9662953 | Minus | 59763-59909 |
| 401405 | 7768126 | Minus | 69276-69452, 69548-69958 |
| 404592 | 9943965 | Minus | 39067-39225 |
| 406203 | 7289992 | Minus | 82220-82639 |
| 404661 | 9797073 | Plus | 33374-33675, 33769-34008 |
| 405411 | 3451356 | Minus | 17503-17778, 18021-18290 |
| 400639 | 9887597 | Plus | 23150-23580 |
| 405705 | 4165009 | Plus | 120228-120800 |
| 403055 | 8748904 | Minus | 109532-110225 |
| 400884 | 9958187 | Minus | 57979-58189 |
| 404877 | 1519284 | Plus | 1095-2107 |
| 401160 | 6067118 | Minus | 8280-8945 |
| 403429 | 9719566 | Minus | 52789-52917 |
| 403154 | 7407986 | Minus | 14228-14736 |
| 401833 | 3063511 | Minus | 77974-78102, 80090-80187, |
| | | | 81695-81773, 8717 |
| 402322 | 7630359 | Minus | 75078-75203 |
| 405204 | 7230116 | Plus | 126569-126754 |
| 403961 | 7596976 | Minus | 110393-110603 |
| 403969 | 8569909 | Plus | 31237-31375, 32405-32506 |
| 401192 | 9719502 | Minus | 69559-70101 |
| 401832 | 3063511 | Minus | 53654-53793, 57497-57647, |
| | | | 60769-60981, 6501 |
| 401797 | 6730720 | Plus | 6973-7118 |
| 404029 | 7671252 | Plus | 108716-111112 |
| 404831 | 6624702 | Minus | 16833-17020, 20007-20120, |
| | | | 21605-21799, 2333 |
| 401463 | 6682291 | Minus | 163135-163262 |
| 403532 | 8076842 | Minus | 81750-81901 |
| 405264 | 7329374 | Plus | 28556-28684 |
| 400810 | 8567959 | Minus | 174204-174331, 175062-175205 |

Pkey: Unique number corresponding to an Eos probeset
Ref: Sequence source. The 7 digit numbers in this column are Genbank Identifier (GI) numbers. “Dunham I. et al.” refers to the publication entitled “The DNA sequence of human chromosome 22.” Dunham I. et al., Nature (1999) 402: 489-495.
Strand: Indicates DNA strand from which exons were predicted.
Nt_position: Indicates nucleotide positions of predicted exons.

[0370] TABLE 12A
About 2867 genes upregulated in lung and breast metastases to the brain relative to normal breast and lung tissues

| | |
|---|---|
| Pkey: | Unique Eos probeset identifier number |
| ExAccn: | Exemplar Accession number, Genbank accession number |
| UniGeneID: | UniGene number |
| UniGene Title: | UniGene gene title |
| R1: | 90th percentile of breast and lung metastases to the brain Als divided by the 90th percentile |
| | of normal breast and lung Als, where the 15th percentile of all normal body tissue |
| | Als was subtracted from the numerator and denominator. |
| SEQ ID NO(s): | SEQ ID number(s) for nucleic acid and protein sequences associated with table entry. |

| Pkey | ExAccn | UniGeneID | UniGene Title | R1 | SEQ ID NO(s): |
|---|---|---|---|---|---|
| 406690 | M29540 | Hs.220529 | carcinoembryonic antigen-related cell ad | 45.45 | 4748 86 |
| 409103 | AF251237 | Hs.112208 | XAGE-1 protein | 27.75 | 333 4812 |
| 412719 | AW016610 | Hs.816 | ESTs | 27.70 | 663 |
| 417308 | H60720 | Hs.81892 | KIAA0101 gene product | 21.61 | 1079 |
| 419078 | M93119 | Hs.89584 | insulinoma-associated 1 | 19.40 | 1272 5036 |
| 422963 | M79141 | Hs.13234 | sphingosine 1-phosphate phosphohydrolase | 19.38 | 1701 |
| 452838 | U65011 | Hs.30743 | preferentially expressed antigen in mela | 15.85 | 4353 5765 |
| 428839 | AI767756 | Hs.82302 | Homo sapiens cDNA FLJ14814 fis, clone NT | 15.75 | 2310 |
| 433447 | U29195 | Hs.3281 | neuronal pentraxin II | 15.70 | 2764 5536 |
| 453857 | AL080235 | Hs.35861 | Ras-induced senescence 1 (RiS1) | 15.19 | 4437 5785 |
| 425057 | AA826434 | Hs.1619 | achaete-scute complex (Drosophila) homol | 14.85 | 1915 |
| 449722 | BE280074 | Hs.23960 | cyclin B1 | 14.55 | 4079 |
| 426682 | AV660038 | Hs.2056 | UDP glycosyltransferase 1 family, polype | 14.40 | 2086 |
| 419875 | AA853410 | Hs.93557 | proenkephalin | 14.02 | 1365 |
| 455601 | AI368680 | Hs.816 | SRY (sex determining region Y)-box 2 | 13.85 | 4515 |
| 418738 | AW388633 | Hs.6682 | solute carrier family 7, (cationic amino | 13.85 | 1234 |
| 430130 | AL137311 | Hs.234074 | Homo sapiens mRNA; cDNA DKFZp761G02121 ( | 13.70 | 2445 5436 |
| 428342 | AI739168 | | Homo sapiens cDNA FLJ13458 fis, clone PL | 13.70 | 2244 |
| 422487 | AJ010901 | Hs.198267 | mucin 4, tracheobronchial | 13.54 | 1649 5152 |
| 424001 | W67883 | Hs.137476 | paternally expressed 10 | 13.45 | 1788 |
| 424922 | BE386547 | Hs.217112 | hypothetical protein MGC10825 | 13.25 | 1900 |
| 412446 | AI768015 | | ESTs | 13.10 | 633 |
| 436217 | T53925 | Hs.107 | fibrinogen-like 1 | 12.63 | 2968 |
| 422440 | NM_004812 | Hs.116724 | aldo-keto reductase family 1, member B10 | 12.60 | 1647 5151 |
| 412140 | AA219691 | Hs.73625 | RAB6 interacting, kinesin-like(rabkines | 12.45 | 613 |
| 439897 | NM_015310 | Hs.6763 | KIAA0942 protein | 12.36 | 3241 5600 |
| 427344 | NM_000869 | Hs.2142 | 5-hydroxytryptamine (serotonin) receptor | 12.25 | 2145 5336 |
| 435538 | AB011540 | Hs.4930 | low density lipoprotein receptor-related | 12.00 | 2924 5565 |
| 425234 | AW152225 | Hs.165909 | ESTs, Weakly similar to I38022 hypotheti | 12.00 | 1940 |
| 418329 | AW247430 | Hs.84152 | cystathionine-beta-synthase | 11.75 | 1186 |
| 414219 | W20010 | Hs.75823 | ALL1-fused gene from chromosome 1q | 11.65 | 804 |
| 447329 | BE090517 | | ESTs, Moderately similar to ALU8_HUMAN A | 11.60 | 3842 |
| 426514 | BE616633 | Hs.170195 | bone morphogenetic protein 7 (osteogenic | 11.55 | 2073 |
| 413554 | AA319146 | Hs.75426 | secretogranin II (chromogranin C) | 11.40 | 734 |
| 414683 | S78296 | Hs.76888 | hypothetical protein MGC12702 | 11.40 | 4923 862 |
| 429922 | Z97630 | Hs.226117 | H1 histone family, member 0 | 11.40 | 2427 5430 |
| 439926 | AW014875 | Hs.137007 | ESTs | 11.30 | 3243 |
| 401451 | | | NM_004496*: Homo sapiens hepatocyte nucle | 11.30 | 27 4697 |
| 436291 | BE568452 | Hs.344037 | protein regulator of cytokinesis 1 | 11.30 | 2975 |
| 442432 | BE093589 | Hs.38178 | hypothetical protein FLJ23468 | 11.30 | 3429 |
| 434001 | AW950905 | Hs.3697 | angiotensinogen | 11.21 | 2804 |
| 432415 | T16971 | Hs.289014 | ESTs, Weakly similar to A43932 mucin 2 p | 10.85 | 2665 |
| 453439 | AI572438 | Hs.32976 | guanine nucleotide binding protein 4 | 10.73 | 4406 |
| 410082 | AA081594 | Hs.158311 | Musashi (Drosophila) homolog 1 | 10.67 | 442 |
| 428450 | NM_014791 | Hs.184339 | KIAA0175 gene product | 10.59 | 2259 5359 |
| 407137 | T97307 | | gb: ye53h05.s1 Soares fetal liver spleen | 10.55 | 128 |
| 457465 | AW301344 | Hs.122908 | DNA replication factor | 10.25 | 4592 |
| 457211 | AW972565 | Hs.32399 | ESTs, Weakly similar to S51797 vasodilat | 10.24 | 4583 |
| 439963 | AW247529 | Hs.6793 | platelet-activating factor acetylhydrola | 10.22 | 3250 |
| 422880 | AF228704 | Hs.193974 | glutathione reductase | 10.15 | 1689 5161 |
| 422656 | AI870435 | Hs.1569 | LIM homeobox protein 2 | 10.15 | 1668 |
| 409269 | AA576953 | Hs.22972 | steroid 5 alpha-reductase 2-like; H5AR g | 10.00 | 358 |
| 428931 | AA994979 | Hs.98967 | ATPase, H()-transporting, lysosomal, non | 9.85 | 2317 |
| 446469 | BE094848 | Hs.15113 | homogentisate 1,2-dioxygenase (homogenti | 9.85 | 3753 |
| 410442 | X73424 | Hs.63788 | propionyl Coenzyme A carboxylase, beta p | 9.85 | 479 4848 |
| 411305 | BE241596 | Hs.69547 | myelin basic protein | 9.84 | 546 |
| 407896 | D76435 | Hs.41154 | Zic family member 1 (odd-paired Drosophi | 9.75 | 213 4785 |
| 446839 | BE091926 | Hs.16244 | mitotic spindle coiled-coil related prot | 9.65 | 3794 |
| 416602 | NM_006159 | Hs.79389 | Protein kinase C-binding protein NELL2 | 9.45 | 1006 4965 |
| 432886 | BE159028 | Hs.279704 | chromatin accessibility complex 1 | 9.30 | 2708 |
| 453884 | AA355925 | Hs.36232 | KIAA0186 gene product | 9.30 | 4444 |
| 407355 | AA846203 | Hs.193974 | ESTs, Weakly similar to ALU1_HUMAN ALU S | 9.30 | 155 |
| 442547 | AA306997 | Hs.217484 | ESTs, Weakly similar to ALU1_HUMAN ALU S | 9.25 | 3439 |
| 443247 | BE614387 | Hs.333893 | c-Myc target JPO1 | 9.25 | 3513 |
| 440274 | R24595 | Hs.7122 | scrapie responsive protein 1 | 9.23 | 3275 |
| 409974 | BE174106 | Hs.225641 | hypothetical protein FLJ13171 | 9.20 | 423 |
| 416655 | AW968613 | Hs.79428 | BCL2/adenovirus E1B 19 kD-interacting pro | 9.19 | 1010 |
| 409041 | AB033025 | Hs.50081 | Hypothetical protein, XP_051860 (KIAA119 | 9.15 | 327 4811 |
| 456977 | AK000252 | Hs.169758 | hypothetical protein FLJ20245 | 9.13 | 4572 5807 |
| 410102 | AW248508 | Hs.279727 | ESTs; homologue of PEM-3 [Ciona savignyi | 9.09 | 446 |
| 437387 | AI198874 | Hs.28847 | AD026 protein | 9.08 | 3062 |
| 411908 | L27943 | Hs.72924 | cytidine deaminase | 9.00 | 4869 585 |
| 407168 | R45175 | Hs.117183 | ESTs | 8.90 | 131 |
| 433160 | AW207002 | Hs.134342 | TASP for testis-specific adriamycin sens | 8.88 | 2742 |
| 446619 | AU076643 | Hs.313 | secreted phosphoprotein 1 (osteopontin, | 8.85 | 3770 |
| 451807 | W52854 | | hypothetical protein FLJ23293 similar to | 8.75 | 4249 |
| 452046 | AB018345 | Hs.27657 | KIAA0802 protein | 8.75 | 4266 5754 |
| 418836 | AI655499 | Hs.161712 | BMP-R1B | 8.71 | 1247 |
| 416854 | H40164 | Hs.80296 | Purkinje cell protein 4 | 8.65 | 1031 |
| 454293 | H49739 | Hs.134013 | ESTs, Moderately similar to HK61_HUMAN H | 8.64 | 4475 |
| 427528 | AU077143 | Hs.179565 | minichromosome maintenance deficient (S. | 8.63 | 2161 |
| 431211 | M86849 | Hs.323733 | gap junction protein, beta 2, 26 kD (conn | 8.60 | 2540 5473 |
| 417576 | AA339449 | Hs.82285 | phosphoribosylglycinamide formyltransfer | 8.55 | 1102 |
| 412519 | AA196241 | Hs.73980 | troponin T1, skeletal, slow | 8.51 | 641 |
| 417333 | AL157545 | Hs.173179 | bromodomain and PHD finger containing, 3 | 8.45 | 1081 |
| 431726 | NM_015361 | Hs.268053 | KIAA0029 protein | 8.45 | 2592 5489 |
| 442355 | AA456539 | Hs.8262 | lysosomal-associated membrane protein 2 | 8.44 | 3424 |
| 412482 | AI499930 | Hs.334885 | mitochondrial GTP binding protein | 8.40 | 636 |
| 429503 | AA394183 | Hs.204166 | ESTs | 8.40 | 2381 |
| 429343 | AK000785 | Hs.199480 | Homo sapiens, Similar to epsin 3, clone | 8.39 | 2356 5402 |
| 427871 | AW992405 | Hs.59622 | Homo sapiens, clone IMAGE: 3507281, mRNA, | 8.17 | 2202 |
| 420234 | AW404908 | Hs.96038 | Ric (Drosophila)-like, expressed in many | 8.15 | 1399 |
| 447342 | AI199268 | Hs.19322 | Homo sapiens, Similar to RIKEN cDNA 2010 | 8.10 | 3845 |
| 423472 | AF041260 | Hs.129057 | breast carcinoma amplified sequence 1 | 8.08 | 1749 5181 |
| 414430 | AI346201 | Hs.76118 | ubiquitin carboxyl-terminal esterase L1 | 8.05 | 828 |
| 443715 | AI583187 | Hs.9700 | cyclin E1 | 8.05 | 3544 |
| 447033 | AI357412 | Hs.157601 | Predicted gene: Eos cloned; secreted w/V | 8.05 | 3814 |
| 407833 | AW955632 | Hs.66666 | ESTs, Weakly similar to S19560 proline-r | 8.05 | 204 |
| 447343 | AA256641 | Hs.236894 | ESTs, Highly similar to S02392 alpha-2-m | 8.04 | 3846 |
| 449349 | AI825386 | | hypothetical protein FLJ21939 similar to | 8.00 | 4057 |
| 420039 | NM_004605 | Hs.94581 | sulfotransferase family, cytosolic, 2B, | 7.97 | 1377 5061 |
| 429228 | AI553633 | | hypothetical protein MGC33630 | 7.94 | 2340 |
| 405770 | | | NM_002362: Homo sapiens melanoma antigen, | 7.85 | 4740 74 |
| 411605 | AW006831 | | ESTs | 7.82 | 563 |
| 418203 | X54942 | Hs.83758 | CDC28 protein kinase 2 | 7.80 | 1169 5003 |
| 442772 | AW503680 | Hs.5957 | Homo sapiens clone 24416 mRNA sequence | 7.80 | 3468 |
| 444783 | AK001468 | Hs.62180 | anillin (Drosophila Scraps homolog), act | 7.75 | 3628 5645 |
| 431374 | BE258532 | Hs.251871 | CTP synthase | 7.70 | 2551 |
| 414761 | AU077228 | Hs.77256 | enhancer of zeste (Drosophila) homolog 2 | 7.70 | 875 |
| 451752 | AB032997 | | KIAA1171 protein | 7.70 | 4247 5750 |
| 443171 | BE281128 | Hs.9030 | TONDU | 7.68 | 3501 |
| 444172 | BE147740 | | ESTs, Moderately similar I38022 hypot | 7.65 | 3580 |
| 445413 | AA151342 | Hs.12677 | CGI-147 protein | 7.65 | 3675 |
| 440700 | AW952281 | Hs.296184 | guanine nucleotide binding protein (G pr | 7.65 | 3313 |
| 407748 | AL079409 | Hs.38176 | KIAA0606 protein; SCN Circadian Oscillat | 7.60 | 188 |
| 423242 | AL039402 | Hs.125783 | DEME-6 protein | 7.58 | 1730 |
| 408633 | AW963372 | Hs.46677 | PRO2000 protein | 7.55 | 286 |
| 438461 | AW075485 | Hs.286049 | phosphoserine aminotransferase | 7.55 | 3141 |
| 424098 | AF077374 | Hs.139322 | Small proline-rich protein 3 | 7.55 | 1804 5199 |
| 432467 | T03667 | Hs.239388 | Human DNA sequence from clone RP1-304B14 | 7.54 | 2671 |
| 427581 | NM_014788 | Hs.179703 | KIAA0129 gene product | 7.50 | 2167 5339 |
| 428648 | AF052728 | Hs.188021 | potassium Voltage-gated channel, subfami | 7.50 | 2279 5369 |
| 425580 | L11144 | Hs.1907 | galanin | 7.40 | 1979 5272 |
| 400409 | AF153341 | | Homo sapiens winged helix/forkhead trans | 7.35 | 15 4687 |
| 414706 | AW340125 | Hs.76989 | KIAA0097 gene product | 7.35 | 865 |
| 429276 | AF056085 | Hs.198612 | G protein-coupled receptor 51 | 7.25 | 2346 5397 |
| 449845 | AW971183 | Hs.6019 | DnaJ (Hsp40) homolog, subfamily C, membe | 7.23 | 4088 |
| 410174 | AA306007 | Hs.59461 | DKFZP434C245 protein | 7.10 | 453 |
| 444670 | H58373 | Hs.332938 | hypothetical protein MGC5370 | 7.10 | 3618 |
| 418164 | AI761820 | Hs.41074 | ESTs, Weakly similar to I39294 McLeod sy | 7.05 | 1165 |
| 429597 | NM_003816 | Hs.2442 | a disintegrin and metalloproteinase doma | 7.00 | 2392 5412 |
| 429903 | AL134197 | Hs.93597 | cyclin-dependent kinase 5, regulatory su | 6.90 | 2425 |
| 428966 | AF059214 | Hs.194687 | cholesterol 25-hydroxylase | 6.90 | 2320 5385 |
| 424834 | AK001432 | Hs.153408 | Homo sapiens cDNA FLJ10570 fis, clone NT | 6.90 | 1889 |
| 430066 | AI929659 | Hs.237825 | signal recognition particle 72 kD | 6.88 | 2442 |
| 433212 | BE218049 | Hs.121820 | ESTs | 6.85 | 2749 |
| 420309 | AW043637 | Hs.21766 | ESTs, Weakly similar to ALU5_HUMAN ALU S | 6.85 | 1408 |
| 409557 | BE182896 | Hs.3686 | ESTs | 6.85 | 384 |
| 430294 | AI538226 | Hs.32976 | guanine nucleotide binding protein 4 | 6.83 | 2463 |
| 415539 | AI733881 | Hs.72472 | BMP-R1B (bone morphogenetic protein rec | 6.80 | 935 |
| 400292 | AA250737 | Hs.72472 | BMP-R1B (bone morphogenetic protein rec | 6.75 | 6 |
| 449048 | Z45051 | Hs.22920 | similar to S68401 (cattle) glucose induc | 6.75 | 4031 |
| 419743 | AW408762 | Hs.5957 | Homo sapiens clone 24416 mRNA sequence | 6.75 | 1356 |
| 430937 | X53463 | Hs.2704 | glutathione peroxidase 2 (gastrointestin | 6.75 | 2522 5466 |
| 442332 | AI693251 | Hs.8248 | Target CAT | 6.70 | 3421 |
| 441020 | W79283 | Hs.35962 | ESTs | 6.66 | 3325 |
| 428771 | AB028992 | Hs.193143 | KIAA1069 protein | 6.65 | 2295 5375 |
| 400205 | | | NM_006265*: Homo sapiens RAD21 (S. pombe) | 6.65 | 1 4680 |
| 438321 | AA576635 | Hs.6153 | CGI-48 protein | 6.65 | 3133 |
| 416208 | AW291168 | Hs.41295 | ESTs, Weakly similar to MUC2_HUMAN MUCIN | 6.65 | 981 |
| 421305 | BE397354 | Hs.324830 | diptheria toxin resistance protein requi | 6.65 | 1505 |
| 448275 | BE514434 | Hs.20830 | kinesin-like 2 | 6.62 | 3955 |
| 426283 | NM_003937 | Hs.169139 | kynureninase (L-kynurenine hydrolase) | 6.61 | 2048 5297 |
| 452099 | BE612992 | Hs.27931 | hypothetical protein FLJ10607 similar to | 6.60 | 4270 |
| 423134 | AJ012582 | Hs.124161 | hyperpolarization activated cyclic nucle | 6.57 | 1720 5170 |
| 408524 | D87942 | Hs.46328 | fucosyltransferase 2 (secretor status in | 6.55 | 275 4799 |
| 434094 | AA305599 | Hs.238205 | hypothetical protein PRO2013 | 6.50 | 2814 |
| 429183 | AB014604 | Hs.197955 | KIAA0704 protein | 6.50 | 2337 5393 |
| 426559 | AB001914 | Hs.170414 | paired basic amino acid cleaving system | 6.50 | 2078 5309 |
| 418327 | U70370 | Hs.84136 | paired-like homeodomain transcription fa | 6.50 | 1185 5009 |
| 407999 | AI126271 | Hs.49433 | ESTs, Weakly similar to YZ28_HUMAN HYPOT | 6.48 | 222 |
| 458814 | AI498957 | Hs.170861 | ESTs, Weakly similar to Z195_HUMAN ZINC | 6.45 | 4638 |
| 438209 | AL120659 | Hs.6111 | aryl-hydrocarbon receptor nuclear transl | 6.45 | 3126 |
| 423634 | AW959908 | Hs.1690 | heparin-binding growth factor binding pr | 6.45 | 1762 |
| 430300 | U60805 | Hs.238648 | oncostatin M receptor | 6.40 | 2465 5441 |
| 426827 | AW067805 | Hs.172665 | methylenetetrahydrofolate dehydrogenase | 6.39 | 2104 |
| 401197 | | | ENSP00000229263*: HSPC213. | 6.39 | |
| 408771 | AW732573 | Hs.47584 | potassium voltage-gated channel, delayed | 6.35 | 305 |
| 432731 | R31178 | Hs.287820 | fibronectin 1 | 6.35 | 2695 |
| 439979 | AW600291 | Hs.6823 | hypothetical protein FLJ10430 | 6.33 | 3251 |
| 441362 | BE614410 | Hs.23044 | RAD51 (S. cerevisiae) homolog (E. coli Re | 6.31 | 3347 |
| 413450 | Z99716 | Hs.75372 | N-acetylgalactosaminidase, alpha- | 6.30 | 4901 723 |
| 410762 | AF226053 | Hs.66170 | HSKM-B protein | 6.30 | 4857 514 |
| 434263 | N34895 | Hs.79187 | ESTs | 6.30 | 2825 |
| 412715 | NM_000947 | Hs.74519 | primase, polypeptide 2A (58 kD) | 6.29 | 4885 662 |
| 433556 | W56321 | Hs.111460 | calcium/calmodulin-dependent protein kin | 6.25 | 2768 |
| 419631 | AW188117 | | popeye protein 3 | 6.25 | 1340 |
| 407235 | D20569 | Hs.169407 | SAC2 (suppressor of actin mutations 2, y | 6.25 | 140 |
| 428484 | AF104032 | Hs.184601 | solute carrier family 7 (cationic amino | 6.23 | 2265 5364 |
| 408452 | AA054683 | Hs.192455 | ESTs, Weakly similar to ALU7_HUMAN ALU S | 6.22 | 268 |
| 412942 | AL120344 | Hs.75074 | mitogen-activated protein kinase-activat | 6.21 | 685 |
| 447397 | BE247676 | Hs.18442 | E-1 enzyme | 6.20 | 3856 |
| 400297 | AI127076 | Hs.306201 | hypothetical protein DKFZp564O1278 | 6.20 | 9 |
| 452259 | AA317439 | Hs.28707 | signal sequence receptor, gamma (translo | 6.20 | 4290 |
| 446636 | AC002563 | Hs.15767 | citron (rho-interacting, serine/threonin | 6.19 | 3773 5674 |
| 450800 | BE395161 | Hs.1390 | proteasome (prosome, macropain) subunit, | 6.19 | 4167 |
| 408527 | AL135018 | Hs.33074 | Homo sapiens, clone IMAGE: 3606519, mRNA, | 6.17 | 276 |
| 416426 | AA180256 | Hs.210473 | Homo sapiens cDNA FLJ14872 fis, clone PL | 6.15 | 996 |
| 424544 | M88700 | Hs.150403 | dopa decarboxylase (aromatic L-amino aci | 6.15 | 1858 5217 |
| 426471 | M22440 | Hs.170009 | transforming growth factor, alpha | 6.15 | 2068 5305 |
| 428004 | AA449563 | Hs.151393 | glutamate-cysteine ligase, catalytic sub | 6.15 | 2213 |
| 452240 | AI591147 | Hs.61232 | ESTs | 6.15 | 4286 |
| 417933 | X02308 | Hs.82962 | thymidylate synthetase | 6.12 | 1139 4996 |
| 434826 | AF155661 | Hs.22265 | pyruvate dehydrogenase phosphatase | 6.11 | 2871 5556 |
| 423198 | M81933 | Hs.1634 | cell division cycle 25A | 6.10 | 1727 5174 |
| 416294 | D86980 | Hs.79170 | KIAA0227 protein | 6.10 | 4958 984 |
| 429663 | M68874 | Hs.211587 | phospholipase A2, group IVA (cytosolic, | 6.08 | 2404 5422 |
| 407944 | R34008 | Hs.239727 | desmocollin 2 | 6.08 | 218 |
| 422283 | AW411307 | Hs.114311 | CDC45 (cell division cycle 45, S. cerevis | 6.07 | 1626 |
| 451027 | AW519204 | Hs.40808 | Homo sapiens, Similar to RIKEN cDNA 2810 | 6.06 | 4183 |
| 401519 | | | C15000476*: gi\|12737279\|ref\|XP_012163.1\| | 6.05 | |
| 420281 | AI623693 | Hs.323494 | Predicted cation efflux pump | 6.05 | 1405 |
| 408908 | BE296227 | Hs.250822 | serine/threonine kinase 15 | 6.05 | 317 |
| 415138 | C18356 | Hs.295944 | tissue factor pathway inhibitor 2 | 6.00 | 910 |
| 420153 | N22120 | Hs.75277 | hypothetical protein FLJ13910 | 5.96 | 1389 |
| 433437 | U20536 | Hs.3280 | caspase 6, apoptosis-related cysteine pr | 5.96 | 2762 5535 |
| 408045 | AW138959 | Hs.245123 | ESTs | 5.95 | 227 |
| 433675 | AW977653 | Hs.75319 | ribonucleotide reductase M2 polypeptide | 5.95 | 2779 |
| 446595 | T57448 | Hs.15467 | hypothetical protein FLJ20725 | 5.95 | 3768 |
| 408298 | AI745325 | Hs.271923 | Homo sapiens cDNA: FLJ22785 fis, clone K | 5.95 | 253 |
| 417454 | NM_000202 | Hs.172458 | iduronate 2-sulfatase (Hunter syndrome) | 5.94 | 1097 4986 |
| 425071 | NM_013989 | Hs.154424 | deiodinase, iodothyronine, type II | 5.91 | 1916 5244 |
| 416933 | BE561850 | Hs.80506 | small nuclear ribonucleoprotein polypept | 5.90 | 1040 |
| 457579 | AB030816 | Hs.36761 | HRAS-like suppressor | 5.90 | 4595 5813 |
| 428987 | NM_004751 | Hs.194710 | glucosaminyl (N-acetyl) transferase 3, m | 5.90 | 2324 5386 |
| 406399 | | | NM_003122*: Homo sapiens serine protease | 5.90 | 4743 78 |
| 442739 | NM_007274 | Hs.8679 | cytosolic acyl coenzyme A thioester hydr | 5.87 | 3464 5626 |
| 420344 | BE463721 | Hs.97101 | putative G protein-coupled receptor | 5.85 | 1415 |
| 452092 | BE245374 | Hs.27842 | hypothetical protein FLJ11210 | 5.85 | 4268 |
| 429925 | NM_000786 | Hs.226213 | cytochrome P450, 51 (lanosterol 14-alpha | 5.85 | 2428 |
| 453204 | R10799 | Hs.191990 | ESTs | 5.85 | 4385 |
| 433345 | AI681545 | Hs.152982 | hypothetical protein FLJ13117 | 5.85 | 2757 |
| 431548 | AI834273 | Hs.9711 | novel protein | 5.85 | 2564 |
| 429966 | BE081342 | Hs.283037 | HSPC039 protein | 5.80 | 2431 |
| 414341 | D80004 | Hs.75909 | KIAA0182 protein | 5.80 | 4919 813 |
| 449145 | AI632122 | Hs.198408 | ESTs | 5.80 | 4039 |
| 447334 | AA515032 | Hs.91109 | ESTs | 5.80 | 3844 |
| 423453 | AW450737 | Hs.128791 | CGI-09 protein | 5.80 | 1748 |
| 410619 | BE512730 | Hs.65114 | keratin 18 | 5.74 | 498 |
| 416990 | AF124145 | Hs.80731 | autocrine motility factor receptor | 5.73 | 1049 4975 |
| 430454 | AW469011 | Hs.105635 | ESTs | 5.72 | 2487 |
| 430569 | AF241254 | Hs.178098 | angiotensin I converting enzyme (peptidy | 5.72 | 2496 5456 |
| 419926 | AW900992 | Hs.93796 | DKFZP586D2223 protein | 5.70 | 1371 |
| 443180 | R15875 | Hs.258576 | claudin 12 | 5.70 | 3504 |
| 428832 | AA578229 | Hs.324239 | ESTs, Moderately similar to ZN91_HUMAN Z | 5.70 | 2308 |
| 433001 | AF217513 | Hs.279905 | clone HQ0310 PRO0310p1 | 5.67 | 2719 5521 |
| 425397 | J04088 | Hs.156346 | topoisomerase (DNA) II alpha (170 KD) | 5.67 | 1959 5261 |
| 443426 | AF098158 | Hs.9329 | chromosome 20 open reading frame 1 | 5.65 | 3523 5627 |
| 409619 | AK001015 | Hs.55220 | BCL2-associated athanogene 2 | 5.65 | 388 |
| 416815 | U41514 | Hs.80120 | UDP-N-acetyl-alpha-D-galactosamine: polyp | 5.65 | 1027 4968 |
| 407378 | AA299264 | Hs.57776 | ESTs, Moderately similar to I38022 hypot | 5.65 | 160 |
| 427658 | H61387 | Hs.30868 | nogo receptor | 5.65 | 2175 |
| 445903 | AI347487 | Hs.132781 | class I cytokine receptor | 5.65 | 3711 |
| 401866 | | | Target Exon | 5.65 | |
| 439680 | AW245741 | Hs.58461 | ESTs, Weakly similar to A35659 krueppel- | 5.65 | 3229 |
| 415752 | BE314524 | Hs.78776 | putative transmembrane protein | 5.64 | 948 |
| 440351 | AF030933 | Hs.7179 | RAD1 (S. pombe) homolog | 5.60 | 3285 5607 |
| 434834 | AF156774 | Hs.324020 | 1-acylglycerol-3-phosphate O-acyltransfe | 5.60 | 2872 5557 |
| 452461 | N78223 | Hs.108106 | transcription factor | 5.60 | 4311 |
| 424140 | Z48051 | Hs.141308 | myelin oligodendrocyte glycoprotein | 5.60 | 1809 5200 |
| 409439 | AW390511 | Hs.288862 | Homo sapiens cDNA: FLJ21260 fis, clone C | 5.59 | 371 |
| 442315 | AA173992 | Hs.7956 | ESTs, Moderately similar to ZN91_HUMAN Z | 5.58 | 3414 |
| 437389 | AL359587 | Hs.271586 | hypothetical protein DKFZp762M115 | 5.55 | 3063 5586 |
| 400277 | | | Eos Control | 5.52 | |
| 442313 | BE388898 | Hs.8215 | hypothetical protein FLJ11307 | 5.50 | 3413 |
| 449444 | AW818436 | | solute carrier family 16 (monocarboxylic | 5.50 | 4062 |
| 420734 | AW972872 | Hs.293736 | ESTs | 5.50 | 1447 |
| 422756 | AA441787 | Hs.119689 | glycoprotein hormones, alpha polypeptide | 5.45 | 1679 |
| 442961 | BE614474 | | F-box only protein 22 | 5.45 | 3484 |
| 439580 | AF086401 | Hs.293847 | ESTs, Moderately similar to S65657 alpha | 5.45 | 3220 |
| 439772 | AL365406 | Hs.10268 | Homo sapiens mRNA full length insert cDN | 5.45 | 3234 |
| 443695 | AW204099 | | ESTs, Weakly similar to AF126780 1 retin | 5.45 | 3541 |
| 409757 | NM_001898 | Hs.123114 | cystatin SN | 5.43 | 403 4832 |
| 422150 | AI867118 | | calpastatin | 5.42 | 1609 |
| 450325 | AI935962 | Hs.91973 | ESTs | 5.41 | 4129 |
| 444758 | AL044878 | Hs.11899 | 3-hydroxy-3-methylglutaryl-Coenzyme A re | 5.40 | 3625 |
| 445266 | BE222118 | Hs.12479 | associated molecule with the SH3 domain | 5.40 | 3665 |
| 457001 | J03258 | Hs.2062 | vitamin D (1,25-dihydroxyvitamin D3) re | 5.40 | 4574 5808 |
| 422938 | NM_001809 | Hs.1594 | centromere protein A (17 kD) | 5.40 | 1694 5162 |
| 446342 | BE298665 | Hs.14846 | solute carrier family 7 (cationic amino | 5.40 | 3746 |
| 425994 | AK000207 | Hs.165803 | hypothetical protein FLJ20200 | 5.37 | 2017 5285 |
| 409799 | D11928 | Hs.76845 | phosphoserine phosphatase-like | 5.35 | 407 |
| 437834 | AA769294 | | gb: nz36g03.s1 NCI_CGAP_GCB1 Homo sapiens | 5.35 | 3096 |
| 407244 | M10014 | | fibrinogen, gamma polypeptide | 5.35 | 143 4767 |
| 437762 | T78028 | Hs.154679 | synaptotagmin I | 5.33 | 3088 |
| 441633 | AW958544 | Hs.112242 | normal mucosa of esophagus specific 1 | 5.32 | 3363 |
| 452223 | AA425467 | Hs.8035 | hypothetical protein MGC2827 | 5.31 | 4283 |
| 450256 | AA286887 | Hs.24724 | MFH-amplified sequences with leucine-ric | 5.31 | 4120 |
| 430335 | D80007 | Hs.239499 | KIAA0185 protein | 5.30 | 2473 5448 |
| 430287 | AW182459 | Hs.125759 | ESTs, Weakly similar to LEU5_HUMAN LEUKE | 5.30 | 2460 |
| 433485 | AI493076 | Hs.306098 | aldo-keto reductase family 1, member C2 | 5.30 | 2766 |
| 423739 | AA398155 | Hs.97600 | ESTs | 5.30 | 1771 |
| 458621 | AI221741 | Hs.117777 | ESTs | 5.30 | 4630 |
| 413585 | AI133452 | Hs.75431 | fibrinogen, gamma polypeptide | 5.30 | 737 |
| 427719 | AI393122 | Hs.134726 | ESTs | 5.29 | 2189 |
| 452721 | AJ269529 | Hs.301871 | solute carrier family 37 (glycerol-3-pho | 5.27 | 4337 5761 |
| 445139 | AB037848 | Hs.12365 | synaptotagmin XIII | 5.27 | 3656 5652 |
| 422095 | AI868872 | Hs.282804 | hypothetical protein FLJ22704 | 5.26 | 1603 |
| 438915 | AA280174 | Hs.285681 | Williams-Beuren syndrome chromosome regi | 5.25 | 3178 |
| 425322 | U63630 | Hs.155637 | protein kinase, DNA-activated, catalytic | 5.24 | 1950 5255 |
| 437915 | AI637993 | Hs.202312 | Homo sapiens clone N11 NTera2D1 teratoca | 5.20 | 3105 |
| 444735 | BE019923 | Hs.243122 | hypothetical protein FLJ13057 similar to | 5.20 | 3623 |
| 439574 | AI469788 | | ESTs | 5.20 | 3219 |
| 408411 | C15118 | Hs.322482 | hypothetical protein DKFZp566J2046 | 5.20 | 265 |
| 421077 | AK000061 | Hs.101590 | hypothetical protein | 5.20 | 1479 5093 |
| 437659 | AB007944 | Hs.5737 | KIAA0475 gene product | 5.15 | 3079 5589 |
| 433023 | AW864793 | | thrombospondin 1 | 5.15 | 2725 |
| 417059 | AL037672 | Hs.81071 | extracellular matrix protein 1 | 5.14 | 1059 |
| 434061 | AW024973 | Hs.283675 | NPD009 protein | 5.12 | 2810 |
| 431448 | AL137517 | Hs.306201 | hypothetical protein DKFZp564O1278 | 5.10 | 2555 5476 |
| 404568 | | | NM_022071*: Homo sapiens hypothetical pro | 5.10 | 4723 56 |
| 420942 | H03514 | Hs.15589 | ESTs | 5.10 | 1467 |
| 410340 | AW182833 | Hs.112188 | hypothetical protein FLJ13149 | 5.10 | 466 |
| 441031 | AI110684 | Hs.7645 | fibrinogen, B beta polypeptide | 5.10 | 3329 |
| 433862 | D86960 | Hs.3610 | KIAA0205 gene product | 5.10 | 2793 5542 |
| 439108 | AW163034 | Hs.6467 | synaptogyrin 3 | 5.07 | 3186 |
| 435664 | AI032087 | Hs.269819 | ESTs | 5.05 | 2936 |
| 422486 | BE514492 | Hs.117487 | gene near HD on 4p16.3 with homology to | 5.05 | 1648 |
| 431789 | H19500 | Hs.269222 | mitogen-activated protein kinase 4 | 5.05 | 2599 |
| 424905 | NM_002497 | Hs.153704 | NIMA (never in mitosis gene a)-related k | 5.05 | 1898 5237 |
| 442053 | R35343 | Hs.24968 | Human DNA sequence from clone RP1-233G16 | 5.05 | 3391 |
| 415691 | AW963979 | Hs.24723 | ESTs | 5.00 | 944 |
| 408705 | AA312135 | Hs.46967 | HSPCO34 protein | 5.00 | 295 |
| 424179 | F30712 | Hs.334573 | Homo sapiens, clone IMAGE: 4285740, mRNA | 5.00 | 1812 |
| 426318 | AA375125 | Hs.147112 | Homo sapiens cDNA: FLJ22322 fis, clone H | 5.00 | 2051 |
| 427675 | AW138190 | Hs.180248 | zinc finger protein 124 (HZF-16) | 5.00 | 2178 |
| 407198 | H91679 | | gb: yv04a07.s1 Soares fetal liver spleen | 5.00 | 135 |
| 412935 | BE267045 | Hs.75064 | tubulin-specific chaperone c | 4.97 | 683 |
| 432378 | AI493046 | Hs.146133 | ESTs | 4.95 | 2662 |
| 428728 | NM_016625 | Hs.191381 | hypothetical protein | 4.95 | 2288 5373 |
| 416111 | AA033813 | Hs.79018 | chromatin assembly factor 1, subunit A ( | 4.95 | 972 |
| 441224 | AU076964 | Hs.7753 | calumenin | 4.95 | 3338 |
| 415339 | NM_015156 | Hs.78398 | KIAA0071 protein | 4.95 | 4946 927 |
| 450353 | AI244661 | Hs.103296 | ESTs, Weakly similar to S65657 alpha-1C- | 4.95 | 4132 |
| 441377 | BE218239 | Hs.202656 | ESTs | 4.95 | 3349 |
| 422765 | AW409701 | Hs.1578 | baculoviral IAP repeat-containing 5 (sur | 4.95 | 1680 |
| 431566 | AF176012 | Hs.260720 | J domain containing protein 1 | 4.94 | 2568 5479 |
| 429788 | U87791 | Hs.221040 | HBS1 (S. cerevisiae)-like | 4.94 | 2417 5426 |
| 404561 | | | trichorhinophalangeal syndrome I gene (T | 4.93 | |
| 437739 | AW579216 | Hs.264610 | ESTs, Moderately similar to lbd1 [H. sapi | 4.93 | 3084 |
| 438549 | BE386801 | Hs.21858 | trinucleotide repeat containing 3 | 4.92 | 3147 |
| 424308 | AW975531 | Hs.154443 | minichromosome maintenance deficient (S. | 4.91 | 1827 |
| 403485 | | | C3001813*: gi\|12737279\|ref\|XP_012163.1\|k | 4.90 | |
| 433929 | AI375499 | Hs.27379 | ESTs | 4.90 | 2799 |
| 416000 | R82342 | Hs.79856 | ESTs, Weakly similar to S65657 alpha-1C- | 4.90 | 965 |
| 424381 | AA285249 | Hs.146329 | protein kinase Chk2 (CHEK2) | 4.90 | 1838 |
| 409420 | Z15008 | Hs.54451 | laminin, gamma 2 (nicein (100 kD), kalini | 4.89 | 368 4824 |
| 426006 | R49031 | Hs.22627 | ESTs | 4.86 | 2019 |
| 447349 | AI375546 | | gb: tc23d04.x1 Soares_total_fetus_Nb2HF8_{—} | 4.86 | 3848 |
| 415786 | AW419196 | Hs.257924 | hypothetical protein FLJ13782 | 4.85 | 951 |
| 450149 | AW969781 | Hs.132863 | Zic family member 2 (odd-paired Drosophi | 4.85 | 4106 |
| 423551 | AA327598 | Hs.89633 | ESTs | 4.83 | 1757 |
| 417348 | AI940507 | Hs.318526 | hypothetical protein FLJ12661 | 4.81 | 1084 |
| 422616 | BE300330 | Hs.118725 | selenophosphate synthetase 2 | 4.80 | 1663 |
| 427209 | H06509 | Hs.92423 | KIAA1566 protein | 4.80 | 2132 |
| 423554 | M90516 | Hs.1674 | glutamine-fructose-6-phosphate transamin | 4.80 | 1758 5182 |
| 419586 | AI088485 | Hs.144759 | ESTs, Weakly similar to I38022 hypotheti | 4.80 | 1335 |
| 437435 | AA249439 | Hs.27027 | hypothetical protein DKFZp762H1311 | 4.80 | 3065 |
| 424602 | AK002055 | Hs.151046 | hypothetical protein FLJ11193 | 4.80 | 1863 5219 |
| 442760 | BE075297 | Hs.6614 | ESTs, Weakly similar to A43932 mucin 2 p | 4.80 | 3466 |
| 458098 | BE550224 | | metallothionein 1E (functional) | 4.80 | 4611 |
| 418322 | AA284166 | Hs.84113 | cyclin-dependent kinase inhibitor 3 (CDK | 4.77 | 1184 |
| 420956 | AA351584 | Hs.100543 | Homo sapiens clone 24505 mRNA sequence | 4.76 | 1468 |
| 408296 | AL117452 | Hs.44155 | DKFZP586G1517 protein | 4.75 | 252 4792 |
| 414343 | AL036166 | Hs.75914 | coated vesicle membrane protein | 4.75 | 814 |
| 438613 | C05569 | Hs.243122 | hypothetical protein FLJ13057 similar to | 4.75 | 3153 |
| 458809 | AW972512 | Hs.20985 | sin3-associated polypeptide, 30 kD | 4.75 | 4637 |
| 430935 | AW072916 | | zinc finger protein 131 (clone pHZ-10) | 4.75 | 2521 |
| 441285 | NM_002374 | Hs.167 | microtubule-associated protein 2 | 4.75 | 3343 5616 |
| 433201 | AB040896 | Hs.21104 | KIAA1463 protein | 4.75 | 2747 5532 |
| 441553 | AA281219 | Hs.121296 | ESTs | 4.74 | 3357 |
| 402812 | | | NM_004930*: Homo sapiens capping protein | 4.73 | 39 4708 |
| 434203 | BE262677 | Hs.283558 | hypothetical protein PRO1855 | 4.72 | 2820 |
| 431899 | AA521381 | Hs.187726 | ESTs | 4.71 | 2614 |
| 401464 | | | histone deacetylase 5 | 4.70 | |
| 413431 | AW246428 | Hs.75355 | ubiquitin-conjugating enzyme E2N (homolo | 4.70 | 720 |
| 453496 | AA442103 | Hs.33084 | solute carrier family 2 (facilitated glu | 4.70 | 4413 |
| 447276 | AL049795 | Hs.17987 | hypothetical protein MGC1203 | 4.70 | 3838 |
| 415927 | AL120168 | Hs.78919 | Kell blood group precursor (McLeod pheno | 4.70 | 961 |
| 418250 | U29926 | Hs.83918 | adenosine monophosphate deaminase (isofo | 4.70 | 1173 5006 |
| 428654 | NM_012091 | Hs.188661 | adenosine deaminase, tRNA-specific 1 | 4.70 | 2280 5370 |
| 412537 | AL031778 | | nuclear transcription factor Y, alpha | 4.70 | 644 |
| 421898 | AA259011 | Hs.109268 | hypothetical protein FLJ12552 | 4.70 | 1578 |
| 425523 | AB007948 | Hs.158244 | KIAA0479 protein | 4.70 | 1973 5268 |
| 451061 | AW291487 | Hs.213659 | ESTs, Weakly similar to KIAA1357 protein | 4.70 | 4186 |
| 424378 | W28020 | Hs.167988 | neural cell adhesion molecule 1 | 4.68 | 1837 |
| 426997 | BE620738 | Hs.173125 | peptidylprolyl isomerase F (cyclophilin | 4.67 | 2120 |
| 441024 | AW081530 | Hs.268231 | ESTs | 4.65 | 3327 |
| 424085 | NM_002914 | Hs.139226 | replication factor C (activator 1) 2 (40 | 4.65 | 1803 5198 |
| 432840 | AK001403 | Hs.279521 | hypothetical protein FLJ20530 | 4.65 | 2704 5516 |
| 428829 | R14050 | Hs.194051 | Homo sapiens mRNA; cDNA DKFZp566B213 (fr | 4.65 | 2306 |
| 438898 | AI819863 | Hs.106243 | ESTs | 4.65 | 3177 |
| 426784 | U03749 | Hs.172216 | chromogranin A (parathyroid secretory pr | 4.65 | 2098 5319 |
| 435937 | AA830893 | Hs.119769 | ESTs | 4.65 | 2953 |
| 419551 | AW582256 | Hs.91011 | anterior gradient 2 (Xenepus laevis) hom | 4.63 | 1330 |
| 431512 | BE270734 | Hs.2795 | lactate dehydrogenase A | 4.62 | 2561 |
| 452834 | AI638627 | Hs.105685 | KIAA1688 protein | 4.60 | 4352 |
| 444858 | AI199738 | Hs.208275 | ESTs, Weakly similar to ALUA_HUMAN !!!! | 4.60 | 3633 |
| 447519 | U46258 | Hs.339665 | ESTs | 4.60 | 3873 |
| 408089 | H59799 | Hs.42644 | thioredoxin-like | 4.60 | 233 |
| 413597 | AW302885 | Hs.117183 | ESTs | 4.60 | 739 |
| 449543 | AF070632 | Hs.23729 | Homo sapiens clone 24405 mRNA sequence | 4.60 | 4066 |
| 418803 | U50079 | Hs.88556 | histone deacetylase 1 | 4.59 | 1241 5029 |
| 408363 | NM_003389 | Hs.44396 | coronin, actin-binding protein, 2A | 4.58 | 260 4794 |
| 432441 | AW292425 | Hs.163484 | intron of hepatocyte nuclear factor-3 al | 4.55 | 2668 |
| 414770 | BE257224 | | Homo sapiens, clone IMAGE: 3873720, mRNA | 4.55 | 876 |
| 433561 | BE540937 | Hs.20104 | hypothetical protein FLJ00052 | 4.55 | 2769 |
| 412970 | AB026436 | Hs.177534 | dual specificity phosphatase 10 | 4.55 | 4890 687 |
| 421928 | AF013758 | Hs.109643 | polyadenylate binding protein-interactin | 4.55 | 1580 5129 |
| 413476 | U25849 | Hs.75393 | acid phosphatase 1, soluble | 4.54 | 4902 726 |
| 426158 | NM_001982 | Hs.199067 | v-erb-b2 avian erythroblastic leukemia v | 4.53 | 2033 5294 |
| 406181 | | | Target Exon | 4.52 | |
| 449644 | AW960707 | Hs.148324 | ESTs | 4.52 | 4072 |
| 438714 | AA814859 | | ESTs | 4.50 | 3161 |
| 438880 | AF075022 | Hs.101480 | ESTs | 4.50 | 3174 |
| 431452 | AI073641 | Hs.152372 | ESTs, Weakly similar to 2109260A B cell | 4.50 | 2556 |
| 442108 | AW452649 | Hs.166314 | ESTs | 4.50 | 3398 |
| 416072 | AL110370 | Hs.79000 | growth associated protein 43 | 4.49 | 970 |
| 414320 | U13616 | Hs.75893 | ankyrin 3, node of Ranvier (ankyrin G) | 4.49 | 4917 810 |
| 446572 | AV659151 | Hs.282961 | ESTs | 4.48 | 3765 |
| 420005 | AW271106 | Hs.133294 | ESTs | 4.47 | 1372 |
| 423979 | AF229181 | Hs.136644 | CS box-containing WD protein | 4.45 | 1786 5191 |
| 425849 | AJ000512 | Hs.296323 | serum/glucocorticoid regulated kinase | 4.45 | 2005 5279 |
| 443257 | AI334040 | Hs.11614 | HSPC065 protein | 4.45 | 3514 |
| 421227 | R78581 | Hs.266308 | mosaic serine protease | 4.45 | 1492 |
| 432339 | AW411259 | | ESTs | 4.45 | 2656 |
| 426699 | AA383337 | Hs.121269 | ESTs | 4.45 | 2089 |
| 418661 | NM_001949 | Hs.1189 | E2F transcription factor 3 | 4.45 | 1222 5022 |
| 439609 | AW971945 | Hs.293236 | ESTs | 4.45 | 3225 |
| 438869 | AF075009 | | gb: Homo sapiens full length insert cDNA | 4.45 | 3171 |
| 424163 | NM_007071 | Hs.142245 | HERV-H LTR-associating 3 | 4.43 | 1811 5201 |
| 452459 | AI356895 | Hs.49359 | hypothetical protein DKFZp547E052 | 4.43 | 4310 |
| 408548 | AA055449 | Hs.63187 | ESTs, Weakly similar to ALUC_HUMAN !!!! | 4.40 | 278 |
| 419594 | AA013051 | Hs.91417 | topoisomerase (DNA) II binding protein | 4.40 | 1339 |
| 431912 | AI660552 | | ESTs, Weakly similar to A56154 AbI subst | 4.40 | 2615 |
| 407930 | AA045847 | Hs.188361 | Homo sapiens cDNA FLJ12807 fis, clone NT | 4.40 | 215 |
| 416902 | AA375634 | Hs.288974 | hypothetical protein FLJ12528 | 4.40 | 1035 |
| 423673 | BE003054 | Hs.1695 | matrix metalloproteinase 12 (macrophage | 4.40 | 1765 |
| 429687 | AI675749 | Hs.211608 | nucleoporin 153 kD | 4.40 | 2406 |
| 404996 | | | Target Exon | 4.40 | |
| 415156 | X84908 | Hs.78060 | phosphorylase kinase, beta | 4.39 | 4940 911 |
| 445871 | AI702901 | Hs.145582 | ESTs, Weakly similar to FOR4 MOUSE FORMI | 4.38 | 3706 |
| 420522 | AW957137 | Hs.98541 | hypothetical protein | 4.38 | 1427 |
| 418816 | T29621 | Hs.88778 | carbonyl reductase 1 | 4.37 | 1243 |
| 457650 | AA649162 | Hs.236456 | ESTs | 4.36 | 4596 |
| 422809 | AK001379 | Hs.121028 | hypothetical protein FLJ10549 | 4.35 | 1684 |
| 421437 | AW821252 | Hs.104336 | hypothetical protein | 4.35 | 1519 |
| 450251 | BE080483 | | gb: QV1-BT0630-280200-086-a05 BT0630 Homo | 4.35 | 4118 |
| 436869 | NM_014867 | Hs.5333 | KIAA0711 gene product | 4.35 | 3015 5581 |
| 448552 | AW973653 | Hs.20104 | hypothetical protein FLJ00052 | 4.35 | 3983 |
| 427083 | NM_006363 | Hs.173497 | Sec23 (S. cerevisiae) homolog B | 4.32 | 2124 5330 |
| 445160 | AI299144 | Hs.101937 | sine oculis homeobox (Drosophila) homolo | 4.32 | 3657 |
| 423681 | AB023215 | Hs.131525 | Homo sapiens mRNA; cDNA DKFZp434E199 (fr | 4.31 | 1766 5184 |
| 412452 | AA215731 | | suppression of tumorigenicity 5 | 4.31 | 634 |
| 433020 | AI375726 | Hs.279918 | hypothetical protein | 4.30 | 2724 |
| 434815 | AF155582 | Hs.46744 | core1 UDP-galactose: N-acetylgalactosamin | 4.30 | 2870 5555 |
| 402802 | | | NM_001397*: Homo sapiens endothelin conver | 4.30 | 38 4707 |
| 402408 | | | NM_030920: Homo sapiens hypothetical pro | 4.30 | 33 4703 |
| 445867 | AF272663 | Hs.13405 | gephyrin | 4.30 | 3705 5660 |
| 448920 | AW408009 | Hs.22580 | alkylglycerone phosphate synthase | 4.30 | 4020 |
| 446006 | NM_004403 | Hs.13530 | deafness, autosomal dominant 5 | 4.28 | 3717 5662 |
| 430589 | AJ002744 | Hs.246315 | UDP-N-acetyl-alpha-D-galactosamine: polyp | 4.27 | 2497 5457 |
| 407807 | AL031427 | Hs.40094 | Human DNA sequence from clone 167A19 on | 4.27 | 198 |
| 417615 | BE548641 | Hs.82314 | hypoxanthine phosphoribosyltransferase 1 | 4.27 | 1107 |
| 425843 | BE313280 | Hs.159627 | death associated protein 3 | 4.26 | 2003 |
| 443837 | AI984625 | Hs.9884 | spindle pole body protein | 4.26 | 3559 |
| 425387 | AB037864 | Hs.156051 | KIAA1443 protein | 4.26 | 1958 5260 |
| 432978 | AF126743 | Hs.279884 | DNAJ domain-containing | 4.26 | 2717 5520 |
| 431797 | BE169641 | Hs.270134 | hypothetical protein FLJ20280 | 4.26 | 2601 |
| 410366 | AI267589 | Hs.302689 | hypothetical protein | 4.26 | 469 |
| 432350 | NM_005865 | Hs.274407 | protease, serine, 16 (thymus) | 4.25 | 2658 5507 |
| 433002 | AF048730 | Hs.279906 | cyclin T1 | 4.25 | 2720 5522 |
| 422168 | AA586894 | Hs.112408 | S100 calcium-binding protein A7 (psorias | 4.25 | 1612 |
| 453005 | AW055308 | Hs.31803 | ESTs, Weakly similar to N-WASP [H. sapien | 4.23 | 4365 |
| 421875 | AA299607 | Hs.98969 | ESTs | 4.21 | 1574 |
| 432140 | AK000404 | Hs.272688 | hypothetical protein FLJ20397 | 4.20 | 2634 5500 |
| 402053 | | | C11001722*: gi\|11436283\|ref\|XP_006959.1\| | 4.20 | |
| 440426 | AI159800 | Hs.7181 | Homo sapiens cDNA FLJ13663 fis, clone PL | 4.20 | 3287 |
| 428479 | Y00272 | Hs.334562 | cell division cycle 2, G1 to S and G2 to | 4.20 | 2264 5363 |
| 418259 | AA215404 | | ESTs | 4.20 | 1174 |
| 413582 | AW295647 | Hs.71331 | hypothetical protein MGC5350 | 4.20 | 736 |
| 436679 | AI127483 | Hs.120451 | ESTs, Weakly similar to unnamed protein | 4.20 | 3002 |
| 446880 | AI811807 | Hs.108646 | Homo sapiens cDNA FLJ14934 fis, clone PL | 4.19 | 3799 |
| 449976 | H06350 | Hs.135056 | Human DNA sequence from clone RP5-850E9 | 4.19 | 4095 |
| 433409 | AI278802 | Hs.25661 | ESTs | 4.19 | 2761 |
| 451380 | H09280 | Hs.13234 | ESTs | 4.16 | 4218 |
| 434540 | NM_016045 | Hs.3945 | CGI-107 protein | 4.16 | 2847 5549 |
| 456844 | AI264155 | Hs.152981 | CDP-diacylglycerol synthase (phosphatida | 4.16 | 4562 |
| 409445 | AW341217 | Hs.14139 | ESTs, Weakly similar to JC5314 CDC28/cdc | 4.15 | 373 |
| 448999 | AF179274 | Hs.22791 | transmembrane protein with EGF-like and | 4.15 | 4024 5717 |
| 452110 | T47667 | Hs.28005 | Homo sapiens cDNA FLJ11309 fis, clone PL | 4.15 | 4272 |
| 437682 | AA476652 | Hs.94952 | Homo sapiens cDNA: FLJ23371 fis, clone H | 4.15 | 3083 |
| 437250 | BE257342 | Hs.94576 | hypothetical protein MGC3062 | 4.15 | 3048 |
| 452279 | AA286844 | | hypothetical protein FLJ13164 | 4.15 | 4293 |
| 425242 | D13635 | Hs.155287 | KIAA0010 gene product | 4.15 | 1942 |
| 433388 | AI432672 | Hs.288539 | hypothetical protein FLJ22191 | 4.15 | 2759 |
| 448072 | AI459306 | Hs.24908 | ESTs | 4.15 | 3940 |
| 423073 | BE252922 | Hs.123119 | MAD (mothers against decapentaplegic, Dr | 4.15 | 1715 |
| 444371 | BE540274 | Hs.239 | forkhead box M1 | 4.14 | 3592 |
| 453951 | AI676235 | Hs.32163 | ESTs | 4.10 | 4455 |
| 422576 | BE548555 | Hs.118554 | CGI-83 protein | 4.10 | 1659 |
| 401558 | | | ENSP00000220478*; SECRETOGRANIN III. | 4.10 | |
| 414962 | AF273304 | Hs.235376 | XPMC2 protein | 4.10 | 4936 896 |
| 431585 | BE242803 | Hs.262823 | hypothetical protein FLJ10326 | 4.10 | 2572 |
| 455505 | AW970640 | Hs.309071 | ESTs | 4.10 | 4511 |
| 449230 | BE613348 | | melanoma cell adhesion molecule | 4.09 | 4049 |
| 434474 | AL042936 | Hs.211571 | holocytochrome c synthase (cytochrome c | 4.08 | 2842 |
| 453902 | BE502341 | Hs.3402 | ESTs | 4.08 | 4449 |
| 430387 | AW372884 | Hs.240770 | nuclear cap binding protein subunit 2, 2 | 4.08 | 2479 |
| 431183 | NM_006855 | Hs.250696 | KDEL (Lys-Asp-Glu-Leu) endoplasmic retic | 4.07 | 2537 5472 |
| 424130 | AL050136 | Hs.140945 | Homo sapiens mRNA; cDNA DKFZp586L141 (fr | 4.07 | 1806 |
| 433029 | NM_014322 | Hs.279926 | opsin 3 (encephalopsin) | 4.06 | 2726 5524 |
| 443683 | BE241717 | Hs.9676 | uncharacterized hypothalamus protein HT0 | 4.06 | 3539 |
| 415701 | NM_003878 | Hs.78619 | gamma-glutamyl hydrolase (conjugase, fol | 4.06 | 4952 945 |
| 412205 | N33818 | Hs.20274 | ESTs, Weakly similar to unnamed protein | 4.05 | 618 |
| 450193 | AI916071 | Hs.15607 | Homo sapiens Fanconi anemia complementat | 4.05 | 4111 |
| 422072 | AB018255 | Hs.111138 | KIAA0712 gene product | 4.05 | 1597 5133 |
| 433077 | AA314262 | Hs.289008 | YDD19 protein | 4.05 | 2732 |
| 413333 | M74028 | Hs.75297 | fibroblast growth factor 1 (acidic) | 4.05 | 712 |
| 417720 | AA205625 | Hs.208067 | ESTs | 4.04 | 1116 |
| 456508 | M502764 | Hs.123469 | ESTs, Weakly similar to AF208855 1 BM-01 | 4.03 | 4547 |
| 437967 | BE277414 | Hs.5947 | mel transforming oncogene (derived from | 4.03 | 3112 |
| 428471 | X57348 | Hs.184510 | stratifin | 4.02 | 2262 5361 |
| 409518 | BE384836 | Hs.3454 | KIAA1821 protein | 4.02 | 380 |
| 451468 | AW503398 | Hs.293663 | ESTs, Moderately similar I38022 hypot | 4.00 | 4224 |
| 421977 | W94197 | Hs.110165 | ribosomal protein L26 homolog | 4.00 | 1588 |
| 413413 | D82520 | | zinc finger protein 36 (KOX 18) | 4.00 | 717 |
| 420851 | AA281062 | Hs.29493 | hypothetical protein FLJ20142 | 4.00 | 1460 |
| 446873 | AI554439 | | ESTs | 4.00 | 3797 |
| 402496 | | | Target Exon | 3.98 | |
| 408784 | AW971350 | Hs.63386 | ESTs | 3.97 | 307 |
| 418004 | U37519 | Hs.87539 | aldehyde dehydrogenase 3 family, member | 3.96 | 1145 4997 |
| 447514 | AI809314 | Hs.208501 | ESTs, Weakly similar to B34087 hypotheti | 3.96 | 3872 |
| 430178 | AW449612 | Hs.152475 | 3'UTR of: achaete-scute complex (Drosoph | 3.96 | 2451 |
| 449810 | AB008681 | Hs.23994 | activin A receptor, type IIB | 3.96 | 4085 5723 |
| 422309 | U79745 | Hs.114924 | solute carrier family 16 (monocarboxylic | 3.96 | 1630 5146 |
| 437763 | AA469369 | Hs.5831 | tissue inhibitor of metalloproteinase 1 | 3.96 | 3089 |
| 430791 | AA486293 | Hs.272068 | ESTs, Weakly similar to ALU3_HUMAN ALU S | 3.96 | 2513 |
| 408761 | AA057264 | Hs.238936 | ESTs, Weakly similar to (defline not ava | 3.95 | 304 |
| 419713 | AW968058 | Hs.92381 | nudix (nucleoside diphosphate linked moi | 3.95 | 1352 |
| 426227 | U67058 | Hs.154299 | Human proteinase activated receptor-2 mR | 3.95 | 2041 |
| 448595 | AB014544 | Hs.21572 | KIAA0644 gene product | 3.95 | 3987 5711 |
| 423175 | W27595 | Hs.347310 | hypothetical protein FLJ14627 | 3.95 | 1724 |
| 425649 | U30930 | Hs.158540 | UDP glycosyltransferase 8 (UDP-galactose | 3.95 | 1982 5273 |
| 411678 | AI907114 | Hs.71465 | squalene epoxidase | 3.94 | 568 |
| 435854 | AJ278120 | Hs.4996 | putative ankyrin-repeat containing prote | 3.93 | 2949 5571 |
| 424954 | NM_000546 | Hs.1846 | tumor protein p53 (Li-Fraumeni syndrome) | 3.92 | 1901 5238 |
| 442767 | AI017208 | Hs.131149 | ESTs | 3.92 | 3467 |
| 407634 | AW016569 | Hs.136414 | UDP-GIcNAc: betaGal beta-1,3-N-acetylgluc | 3.91 | 174 |
| 457819 | AA057484 | Hs.35406 | FLJ20522 Hypothetical protein FLJ20522 | 3.91 | 4601 |
| 410418 | D31382 | Hs.63325 | transmembrane protease, serine 4 | 3.90 | 476 |
| 404704 | | | NM_001539*: Homo sapiens heat shock prote | 3.90 | 4727 60 |
| 403127 | | | polymerase (DNA directed), delta 1, cata | 3.90 | |
| 436643 | AA757626 | Hs.10941 | ESTs, Weakly similar to IPP1_HUMAN PROTE | 3.90 | 2999 |
| 416498 | U33632 | Hs.79351 | potassium channel, subfamily K, member 1 | 3.90 | 4962 999 |
| 413281 | AA861271 | Hs.222024 | transcription factor BMAL2 | 3.90 | 706 |
| 446999 | AA151520 | | hypothetical protein MGC4485 | 3.90 | 3811 |
| 429610 | AB024937 | Hs.211092 | LUNX protein; PLUNC (palate lung and nas | 3.89 | 2395 5415 |
| 446356 | AI816736 | Hs.14896 | DHHC1 protein | 3.88 | 3747 |
| 458997 | AW937420 | | ESTs | 3.88 | 4650 |
| 440074 | AA863045 | Hs.10669 | ESTs, Weakly similar to T00050 hypotheti | 3.88 | 3259 |
| 436087 | BE300296 | Hs.5054 | CGI-133 protein | 3.87 | 2963 |
| 448690 | AK001304 | Hs.21771 | Wolf-Hirschhorn syndrome candidate 2 | 3.87 | 3998 |
| 446269 | AW263155 | Hs.14559 | hypothetical protein FLJ10540 | 3.86 | 3741 |
| 449696 | AW779666 | Hs.266854 | ESTs | 3.86 | 4074 |
| 444864 | AW965446 | Hs.81907 | ESTs, Weakly similar to T26501 hypotheti | 3.85 | 3635 |
| 424921 | AA348491 | Hs.322456 | hypothetical protein DKFZp761D0211 | 3.85 | 1899 |
| 412123 | BE251328 | Hs.73291 | hypothetical protein FLJ10881 | 3.85 | 610 |
| 434725 | AK000796 | Hs.4104 | hypothetical protein | 3.85 | 2863 5553 |
| 408670 | AF160967 | Hs.46784 | potassium large conductance calcium-acti | 3.85 | 291 4803 |
| 409151 | AA306105 | Hs.50785 | SEC22, vesicle trafficking protein (S. c | 3.85 | 341 |
| 422956 | BE545072 | Hs.122579 | ECT2 protein (Epithelial cell transformi | 3.85 | 1698 |
| 421662 | NM_014141 | Hs.106552 | cell recognition molecule Caspr2 | 3.84 | 1552 5119 |
| 427674 | NM_003528 | Hs.2178 | H2B histone family, member Q | 3.84 | 2177 5342 |
| 441680 | AW444598 | Hs.7940 | RAP1, GTP-GDP dissociation stimulator 1 | 3.83 | 3368 |
| 440325 | NM_003812 | Hs.7164 | a disintegrin and metalloproteinase doma | 3.83 | 3281 5606 |
| 434423 | NM_006769 | Hs.3844 | LIM domain only 4 | 3.83 | 2839 5548 |
| 416586 | D44643 | Hs.14144 | secreted modular calcium-binding protein | 3.82 | 1005 |
| 413551 | BE242639 | Hs.75425 | ubiquitin associated protein | 3.81 | 733 |
| 425007 | AA456483 | Hs.172081 | phosphodiesterase 4D, cAMP-specific (dun | 3.81 | 1910 |
| 430399 | AI916284 | Hs.199671 | ESTs | 3.81 | 2482 |
| 429345 | R11141 | Hs.199695 | hypothetical protein | 3.81 | 2357 |
| 426722 | U53823 | Hs.171952 | occludin | 3.81 | 2091 5316 |
| 428227 | AA321649 | Hs.2248 | small inducible cytokine subfamily B (Cy | 3.80 | 2231 |
| 404632 | | | NM_022490: Homo sapiens hypothetical prot | 3.80 | 4726 59 |
| 432169 | Y00971 | Hs.2910 | phosphoribosyl pyrophosphate synthetase | 3.80 | 2637 5501 |
| 420805 | L10333 | Hs.99947 | reticulon 1 | 3.80 | 1456 5088 |
| 411704 | AI499220 | Hs.71573 | hypothetical protein FLJ10074 | 3.80 | 571 |
| 453891 | AB037751 | Hs.36353 | Homo sapiens mRNA full length insert cDN | 3.80 | 4446 5787 |
| 435513 | AW404075 | Hs.42785 | DC11 protein | 3.80 | 2922 |
| 445165 | AV652831 | Hs.234058 | gb: AV652831 GLC Homo sapiens cDNA clone | 3.80 | 3658 |
| 404571 | | | NM_015902*: Homo sapiens progestin induce | 3.80 | 4724 57 |
| 455019 | AW850818 | | gb: IL3-CT0220-091199-026-A03 CT0220 Homo | 3.79 | 4500 |
| 426501 | AW043782 | Hs.293616 | ESTs | 3.79 | 2072 |
| 407777 | AA161071 | Hs.71465 | squalene epoxidase | 3.79 | 194 |
| 442064 | AI422867 | Hs.88594 | ESTs | 3.79 | 3392 |
| 440590 | AI863446 | Hs.266308 | mosaic serine protease | 3.78 | 3301 |
| 441128 | AA570256 | | ESTs, Weakly similar to T23273 hypotheti | 3.75 | 3334 |
| 407300 | AA102616 | Hs.120769 | gb: zn43e07.s1 Stratagene HeLa cell s3 93 | 3.75 | 149 |
| 419682 | H13139 | Hs.92282 | paired-like homeodomain transcription fa | 3.75 | 1349 |
| 411598 | BE336654 | Hs.70937 | H3 histone family, member A | 3.75 | 562 |
| 453900 | AW003582 | Hs.226414 | ESTs, Weakly similar to ALU8_HUMAN ALU S | 3.75 | 4448 |
| 421202 | AF193339 | Hs.102506 | eukaryotic translation initiation factor | 3.75 | 1489 5097 |
| 423645 | AI215632 | Hs.147487 | ESTs | 3.75 | 1764 |
| 455459 | AW947654 | | gb: RCO-MT0003-140300-031-b06 MT0003 Homo | 3.75 | 4509 |
| 411450 | H49619 | Hs.127301 | ESTs | 3.75 | 557 |
| 425842 | AI587490 | Hs.159623 | NK-2 (Drosophila) homolog B | 3.75 | 2002 |
| 410935 | BE067395 | Hs.66881 | dynein, cytoplasmic, intermediate polype | 3.74 | 521 |
| 447735 | AA775268 | Hs.6127 | Homo sapiens CDNA: FLJ23020 fis, clone L | 3.74 | 3898 |
| 454417 | AI244459 | Hs.110826 | trinucleotide repeat containing 9 | 3.74 | 4480 |
| 408349 | BE546947 | Hs.44276 | homeo box C10 | 3.73 | 258 |
| 439778 | AL109729 | Hs.99364 | putative transmembrane protein | 3.73 | 3235 |
| 452012 | AA307703 | Hs.279766 | kinesin family member 4A | 3.70 | 4262 |
| 400102 | | | Eos Control | 3.70 | |
| 415621 | AI648602 | Hs.55468 | ESTs | 3.70 | 938 |
| 437866 | AA156781 | | metallothionein 1E (functional) | 3.70 | 3101 |
| 443687 | F13040 | | KIAA1228 protein | 3.70 | 3540 |
| 428690 | AI948490 | Hs.98765 | ESTs | 3.70 | 2281 |
| 450447 | AF212223 | Hs.25010 | hypothetical protein P15-2 | 3.70 | 4139 5730 |
| 444946 | AW139205 | Hs.156457 | hypothetical protein FLJ22408 | 3.70 | 3642 |
| 427779 | AA906997 | Hs.180780 | TERA protein | 3.69 | 2195 |
| 437929 | T09353 | Hs.106642 | ESTs, Weakly similar to T09052 hypotheti | 3.68 | 3108 |
| 439588 | AA838166 | Hs.174644 | hypothetical protein FLJ21669 | 3.68 | 3221 |
| 430044 | AA464510 | Hs.152812 | ESTs | 3.68 | 2439 |
| 427982 | NM_016156 | Hs.181326 | KIAA1073 protein | 3.67 | 2210 5349 |
| 421180 | BE410992 | Hs.258730 | heme-regulated initiation factor 2-alpha | 3.65 | 1486 |
| 434063 | AA018893 | Hs.3727 | unr.interacting protein | 3.65 | 2811 |
| 433701 | AW445023 | Hs.15155 | ESTs | 3.65 | 2782 |
| 422390 | AW450893 | Hs.121830 | ESTs, Weakly similar to T42682 hypotheti | 3.65 | 1638 |
| 451407 | AA131376 | Hs.343809 | fibroblast growth factor 12B | 3.65 | 4220 |
| 421991 | NM_014918 | Hs.110488 | KIAA0990 protein | 3.65 | 1589 5132 |
| 429656 | X05608 | Hs.211584 | neurofilament, tight polypeptide (68 kD) | 3.65 | 2403 5421 |
| 415068 | Z19448 | Hs.131887 | ESTs, Weakly similar to T24396 hypotheti | 3.65 | 904 |
| 416198 | H27332 | Hs.99598 | hypothetical protein MGC5338 | 3.65 | 980 |
| 425782 | U66468 | Hs.159525 | cell growth regulatory with EF-hand doma | 3.65 | 1996 5278 |
| 452512 | AW363486 | Hs.337635 | ESTs | 3.65 | 4319 |
| 446162 | AI631319 | Hs.63841 | hypothetical protein DKFZp434E2318 | 3.65 | 3730 |
| 402114 | | | Target Exon | 3.65 | |
| 437204 | AL110216 | | ESTs, Weakly similar to I55214 salivary | 3.65 | 3043 |
| 419354 | M62839 | Hs.1252 | apolipoprotein H (beta-2-glycoprotein I) | 3.65 | 1303 5044 |
| 448105 | AW591433 | Hs.298241 | Transmembrane protease, serine 3 | 3.64 | 3943 |
| 405204 | | | NM_002086*: Homo sapiens growth factor re | 3.64 | 4731 65 |
| 412314 | AA825247 | | G protein-coupled receptor 27 (GPR27) (S | 3.64 | 623 |
| 427398 | AW390020 | Hs.20415 | chromosome 21 open reading frame 11 | 3.64 | 2151 |
| 418941 | AA452970 | Hs.239527 | E1B-55kDa-associated protein 5 | 3.64 | 1260 |
| 433730 | AK002135 | Hs.3542 | hypothetical protein FLJ11273 | 3.64 | 2783 5540 |
| 456439 | AA251242 | Hs.103238 | ESTs | 3.63 | 4542 |
| 446783 | AW138343 | Hs.141867 | ESTs | 3.63 | 3786 |
| 439211 | AI890347 | Hs.271923 | Homo sapiens cDNA: FLJ22785 fis, clone K | 3.63 | 3193 |
| 450516 | AA902656 | Hs.21943 | NIF3 (Ngg1 interacting factor 3, S. pombe | 3.62 | 4141 |
| 431933 | AI187057 | Hs.132554 | ESTs | 3.62 | 2618 |
| 429084 | AJ001443 | Hs.195614 | splicing factor 3b, subunit 3, 130 kD | 3.62 | 2332 5390 |
| 432284 | AA532807 | Hs.105822 | ESTs | 3.61 | 2653 |
| 452833 | BE559681 | Hs.30736 | KIAA0124 protein | 3.61 | 4351 |
| 447702 | AI420256 | Hs.161271 | ESTs | 3.60 | 3894 |
| 449571 | AW016812 | Hs.200266 | ESTs | 3.60 | 4069 |
| 414747 | U30872 | Hs.77204 | centromere protein F (350/400 kD, mitosin | 3.60 | 4927 873 |
| 431542 | H63010 | Hs.5740 | ESTs | 3.60 | 2562 |
| 426788 | U66615 | Hs.172280 | SWI/SNF related, matrix associated, acti | 3.60 | 2099 5320 |
| 415791 | H09366 | Hs.78853 | uracil-DNA glycosylase | 3.60 | 953 |
| 440492 | R39127 | Hs.26966 | hypothetical protein DKFZp547J036 | 3.59 | 3292 |
| 457670 | AF119666 | Hs.23449 | insulin receptor tyrosine kinase substra | 3.58 | 4599 5814 |
| 409262 | AK000631 | Hs.52256 | hypothetical protein FLJ20624 | 3.57 | 355 4819 |
| 446872 | X97058 | Hs.16362 | pyrimidinergic receptor P2Y, G-protein c | 3.57 | 3796 5678 |
| 414696 | AF002020 | Hs.76918 | Niemann-Pick disease, type C1 | 3.57 | 4924 864 |
| 436134 | AK000618 | Hs.123784 | ESTs | 3.57 | 2964 |
| 427853 | AI569798 | Hs.98260 | ESTs | 3.57 | 2201 |
| 414222 | AL135173 | Hs.878 | sorbitol dehydrogenase | 3.56 | 805 |
| 411285 | AI733766 | Hs.69429 | Homo sapiens IMAGE: 512024 clone, mRNA | 3.55 | 545 |
| 453160 | AI263307 | | H2B histone family, member L | 3.55 | 4380 |
| 422094 | AF129535 | Hs.272027 | F-box only protein 5 | 3.55 | 1602 5137 |
| 438118 | AW753311 | | ESTs | 3.55 | 3119 |
| 429048 | AI372949 | Hs.44241 | Homo sapiens cDNA: FLJ21447 fis, clone C | 3.55 | 2329 |
| 432329 | NM_002962 | Hs.2960 | S100 calcium-binding protein A5 | 3.55 | 2655 5506 |
| 449318 | AW236021 | Hs.78531 | Homo sapiens, Similar to RIKEN cDNA 5730 | 3.55 | 4055 |
| 444151 | AW972917 | Hs.128749 | alpha-methylacyl-CoA racemase | 3.55 | 3577 |
| 443450 | N66045 | Hs.133529 | ESTs | 3.55 | 3524 |
| 453507 | AF083217 | Hs.33085 | WD repeat domain 3 | 3.54 | 4414 5778 |
| 432540 | AI821517 | Hs.105866 | ESTs | 3.54 | 2678 |
| 448664 | AI879317 | Hs.334691 | splicing factor 3a, subunit 1, 120 kD | 3.54 | 3994 |
| 402855 | | | NM_001839*: Homo sapiens calponin 3, acid | 3.54 | 40 4709 |
| 453751 | R36762 | Hs.101282 | Homo sapiens cDNA: FLJ21238 fis, clone C | 3.53 | 4428 |
| 403817 | | | NM_015271: Homo sapiens tripartite motif- | 3.53 | 4716 48 |
| 427471 | AA403131 | Hs.266782 | KIAA1826 protein | 3.52 | 2154 |
| 431387 | AI878854 | Hs.252229 | v-maf musculoaponeurotic fibrosarcoma (a | 3.52 | 2552 |
| 415947 | U04045 | Hs.78934 | mutS (E. coli) homolog 2 (colon cancer, | 3.52 | 4955 962 |
| 438523 | H66220 | Hs.278177 | ESTs | 3.51 | 3144 |
| 452874 | AK001061 | Hs.30925 | hypothetical protein FLJ10199 | 3.51 | 4355 5766 |
| 453033 | AA325869 | Hs.31463 | KIAA0281 gene product | 3.50 | 4369 |
| 439605 | AF086431 | Hs.22380 | ESTs | 3.50 | 3223 |
| 453785 | AI368236 | Hs.283732 | ESTs, Moderately similar to ALU1_HUMAN A | 3.50 | 4432 |
| 434970 | AW272262 | Hs.225767 | ESTs | 3.50 | 2884 |
| 406081 | | | Target Exon | 3.50 | |
| 430712 | AW044647 | | ESTs | 3.50 | 2507 |
| 420912 | AW853156 | Hs.90787 | ESTs | 3.50 | 1463 |
| 411096 | U80034 | Hs.68583 | mitochondrial intermediate peptidase | 3.50 | 4862 535 |
| 418338 | NM_002522 | Hs.84154 | neuronal pentraxin I | 3.50 | 1189 5010 |
| 409902 | AI337658 | Hs.156351 | ESTs | 3.50 | 416 |
| 406685 | M18728 | | gb: Human nonspecific crossreacting antig | 3.49 | 4745 83 |
| 442045 | C05768 | Hs.8078 | Homo sapiens clone FBD3 Cri-du-chat crit | 3.49 | 3390 |
| 440773 | AA352702 | Hs.37747 | Homo sapiens, Similar to RIKEN cDNA 2700 | 3.49 | 3318 |
| 408393 | AW015318 | Hs.23165 | ESTs | 3.49 | 263 |
| 446825 | BE266822 | Hs.344097 | filamin A, alpha (actin-binding protein- | 3.48 | 3792 |
| 450937 | R49131 | Hs.26267 | ATP-dependant interferon response protei | 3.48 | 4177 |
| 421948 | L42583 | Hs.334309 | keratin 6A | 3.47 | 1583 5130 |
| 448296 | BE622756 | Hs.10949 | Homo sapiens cDNA FLJ14162 fis, clone NT | 3.47 | 3956 |
| 459709 | AA653774 | Hs.212084 | ESTs | 3.47 | 4679 |
| 412507 | L36645 | Hs.73964 | EphA4 | 3.46 | 4880 639 |
| 442426 | AI373062 | Hs.332938 | hypothetical protein MGC5370 | 3.46 | 3427 |
| 438956 | W00847 | Hs.135056 | Human DNA sequence from clone RP5-850E9 | 3.46 | 3180 |
| 435092 | AL137310 | Hs.4749 | Homo sapiens mRNA; cDNA DKFZp761E13121 ( | 3.45 | 2895 5562 |
| 443347 | AI052543 | Hs.133244 | melanoma-derived leucine zipper, extra-n | 3.45 | 3519 |
| 411261 | AW834655 | | gb: MR2-TT0014-291199-017-g11 TT0014 Homo | 3.45 | 543 |
| 416658 | U03272 | Hs.79432 | fibrillin 2 (congenital contractural ara | 3.45 | 1011 4966 |
| 453941 | U39817 | Hs.36820 | Bloom syndrome | 3.45 | 4454 5790 |
| 442353 | BE379594 | Hs.49136 | ESTs, Moderately similar to ALU7_HUMAN A | 3.45 | 3423 |
| 410206 | NM_003826 | Hs.60415 | N-ethylmaleimide-sensitive factor attach | 3.45 | 454 4840 |
| 441865 | AA384726 | Hs.5722 | hypothetical protein FLJ23316 | 3.45 | 3376 |
| 414602 | AW630088 | Hs.76550 | Homo sapiens mRNA; cDNA DKFZp564B1264 (f | 3.44 | 853 |
| 432229 | AW290976 | Hs.143587 | ESTs | 3.43 | 2646 |
| 434808 | AF155108 | Hs.256150 | NY-REN-41 antigen | 3.43 | 2868 5554 |
| 415632 | U67085 | Hs.78524 | TcD37 homolog | 3.43 | 4950 939 |
| 441790 | AW294909 | Hs.132208 | ESTs | 3.42 | 3372 |
| 438697 | AA814439 | | ESTs | 3.42 | 3157 |
| 452827 | AI571835 | Hs.55468 | ESTs | 3.42 | 4350 |
| 441805 | AA285136 | Hs.301914 | neuronal specific transcription factor D | 3.42 | 3373 |
| 433149 | BE257672 | Hs.42949 | hypothetical protein HES6 | 3.42 | 2740 |
| 438832 | AA827023 | Hs.270981 | hypothetical protein FLJ14397 | 3.41 | 3169 |
| 425548 | AA890023 | Hs.1906 | prolactin receptor | 3.41 | 1978 |
| 406304 | | | transcriptional adaptor 3 (ADA3, yeast h | 3.40 | |
| 434844 | AF157116 | Hs.22350 | hypothetical protein LOC56757 | 3.40 | 2873 |
| 447669 | AL049985 | Hs.19180 | Homo sapiens mRNA; cDNA DKFZp564E122 (fr | 3.40 | 3888 |
| 400884 | | | Target Exon | 3.40 | |
| 411683 | W01167 | Hs.50426 | ESTs | 3.40 | 569 |
| 445242 | BE156478 | Hs.21108 | ESTs, Weakly similar to ALU1_HUMAN ALU S | 3.40 | 3661 |
| 424796 | AW298244 | Hs.266195 | ESTs | 3.40 | 1887 |
| 422358 | AL133030 | Hs.115429 | Homo sapiens mRNA for KIAA1666 protein, | 3.40 | 1635 5149 |
| 404995 | | | ENSP00000251890*: Monocytic leukemia zinc | 3.40 | |
| 438525 | AW368528 | Hs.100855 | ESTs | 3.40 | 3145 |
| 415263 | AA948033 | Hs.130853 | ESTs | 3.40 | 920 |
| 428753 | AW939252 | Hs.192927 | hypothetical protein FLJ20251 | 3.40 | 2291 |
| 449343 | AI151418 | | protein phosphatase 3 (formely 2B), cat | 3.40 | 4056 |
| 412863 | AA121673 | Hs.59757 | zinc finger protein 281 | 3.40 | 679 |
| 424036 | AA770688 | | H2A histone family, member L | 3.40 | 1793 |
| 452823 | AB012124 | Hs.30696 | transcription factor-like 5 (basic helix | 3.40 | 4348 5764 |
| 408437 | AW957744 | Hs.278469 | lacrimal proline rich protein | 3.39 | 267 |
| 415402 | AA164687 | Hs.177576 | mannosyl (alpha-1,3-)-glycoprotein beta- | 3.39 | 930 |
| 412722 | AI343300 | Hs.15091 | ESTs | 3.38 | 664 |
| 426793 | X89887 | Hs.172350 | HIR (histone cell cycle regulation defec | 3.38 | 2100 5321 |
| 417366 | BE185289 | Hs.1076 | small proline-rich protein 1B (cornifin) | 3.38 | 1087 |
| 422611 | AA158177 | Hs.118722 | fucosyltransferase 8 (alpha (1,6) fucosy | 3.38 | 1662 |
| 452598 | AI831594 | | ESTs, Weakly similar to ALU7_HUMAN ALU S | 3.38 | 4328 |
| 406981 | S71129 | | acetylcholinesterase (YT blood group) | 3.38 | 117 4761 |
| 414844 | AA296874 | Hs.77494 | deoxyguanosine kinase | 3.37 | 884 |
| 409235 | AA188827 | Hs.7988 | ESTs, Weakly similar to I38022 hypotheti | 3.37 | 354 |
| 436608 | AA628980 | Hs.192371 | down syndrome critical region protein DS | 3.36 | 2997 |
| 415474 | NM_014252 | Hs.78457 | solute carrier family 25 (mitochondrial | 3.36 | 4948 934 |
| 447850 | AB018298 | Hs.19822 | SEC24 (S. cerevisiae) related gene famil | 3.36 | 3914 5702 |
| 400583 | | | Target Exon | 3.36 | |
| 419138 | U48508 | Hs.89631 | ryanodine receptor 1 (skeletal) | 3.36 | 1281 5039 |
| 430188 | AL049242 | Hs.234794 | Homo sapiens mRNA; cDNA DKFZp564B083 (fr | 3.35 | 2453 |
| 452323 | W44356 | Hs.292812 | ESTs, Weakly similar to T33468 hypotheti | 3.35 | 4296 |
| 437534 | AA814471 | Hs.23510 | ESTs | 3.35 | 3068 |
| 441420 | AA932872 | | gb: oo57d07.s1 NCI_CGAP_Lu5 Homo sapiens | 3.35 | 3352 |
| 420337 | AW295840 | Hs.14555 | Homo sapiens cDNA: FLJ21513 fis, clone C | 3.35 | 1414 |
| 408101 | AW968504 | Hs.123073 | CDC2-related protein kinase 7 | 3.35 | 234 |
| 425769 | U72513 | Hs.159486 | Human RPL13-2 pseudogene mRNA, complete | 3.35 | 1995 |
| 451806 | NM_003729 | Hs.27076 | RNA 3′-terminal phosphate cyclase | 3.35 | 4248 5751 |
| 409673 | AK000611 | Hs.55781 | hypothetical protein FLJ20604 | 3.35 | 393 4830 |
| 410166 | AK001376 | Hs.59346 | hypothetical protein FLJ10514 | 3.35 | 451 4839 |
| 412673 | AL042957 | Hs.31845 | ESTs | 3.35 | 659 |
| 442326 | H92962 | Hs.124813 | hypothetical protein MGC14817 | 3.35 | 3417 |
| 410660 | AI061118 | Hs.65328 | Fanconi anemia, complementation group F | 3.35 | 502 |
| 442660 | AW138174 | Hs.130651 | ESTs | 3.35 | 3458 |
| 442573 | H93366 | Hs.7567 | branched chain aminotransferase 1, cytos | 3.35 | 3446 |
| 447644 | AW861622 | Hs.108646 | Homo sapiens cDNA FLJ14934 fis, clone PL | 3.35 | 3886 |
| 448752 | AA593867 | Hs.300842 | KIAA1608 protein | 3.34 | 4003 |
| 402537 | | | C1003560*: gi\|10435919\|dbj\|BAB14704.1\| (A | 3.33 | |
| 432834 | F06459 | Hs.289113 | cytochrome b5 reductase 1 (B5R.1) | 3.33 | 2703 |
| 418721 | NM_002731 | Hs.87773 | protein kinase, cAMP-dependent, catalyti | 3.33 | 1231 5027 |
| 425424 | NM_004954 | Hs.157199 | ELKL motif kinase | 3.33 | 1962 5263 |
| 434340 | AI193043 | Hs.128685 | ESTs, Weakly similar to T17226 hypotheti | 3.32 | 2830 |
| 443209 | AI040125 | Hs.150521 | ESTs | 3.32 | 3508 |
| 401560 | | | heparan sulfate (glucosamine) 3-O-sulfot | 3.31 | |
| 447832 | AI433357 | | ESTs | 3.31 | 3911 |
| 453469 | AB014533 | Hs.33010 | KIAA0633 protein | 3.31 | 4412 5777 |
| 426600 | NM_003378 | Hs.171014 | VGF nerve growth factor inducible | 3.30 | 2081 5312 |
| 435770 | AA699991 | Hs.348162 | gb: zi69a09.s1 Soares_fetal_liver_spleen_{—} | 3.30 | 2942 |
| 410491 | AA465131 | Hs.64001 | Homo sapiens clone 25218 mRNA sequence | 3.30 | 484 |
| 444070 | NM_015367 | Hs.10267 | MIL1 protein | 3.30 | 3571 5635 |
| 424332 | AA338919 | Hs.101615 | ESTs | 3.30 | 1830 |
| 421768 | AI923934 | Hs.108112 | histone fold protein CHRAC17; DNA polyme | 3.30 | 1560 |
| 425018 | BE245277 | Hs.154196 | E4F transcription factor 1 | 3.30 | 1912 |
| 430187 | AI799909 | Hs.158989 | ESTs | 3.30 | 2452 |
| 452234 | AW084176 | Hs.223296 | ESTs, Weakly similar to I38022 hypotheti | 3.30 | 4284 |
| 440138 | AB033023 | Hs.318127 | hypothetical protein FLJ10201 | 3.30 | 3267 5603 |
| 444743 | AA045648 | Hs.301957 | nudix (nucleoside diphosphate linked moi | 3.30 | 3624 |
| 411019 | AW993097 | Hs.48617 | Homo sapiens cDNA FLJ12540 fis, clone NT | 3.30 | 528 |
| 438378 | AW970529 | Hs.86434 | hypothetical protein FLJ21816 | 3.30 | 3136 |
| 407204 | R41933 | Hs.140237 | ESTs, Weakly similar to ALU1_HUMAN ALU S | 3.29 | 136 |
| 440704 | M69241 | Hs.162 | insulin-like growth factor binding prote | 3.29 | 3314 5613 |
| 441622 | AW450957 | Hs.224864 | ESTs | 3.29 | 3361 |
| 425840 | AW978731 | Hs.301824 | hypothetical protein PRO1331 | 3.29 | 2001 |
| 440006 | AK000517 | Hs.6844 | NALP2 protein; PYRIN-Containing APAF1-li | 3.29 | 3252 5601 |
| 450291 | AW015549 | Hs.269199 | ESTs | 3.28 | 4124 |
| 440282 | BE262386 | | clones 23667 and 23775 zinc finger prote | 3.27 | 3277 |
| 440675 | AW005054 | Hs.279788 | ESTs, Weakly similar to KCC1_HUMAN CALCI | 3.27 | 3312 |
| 424259 | AK001776 | Hs.143954 | hypothetical protein FLJ10914 | 3.26 | 1822 5207 |
| 431130 | NM_006103 | Hs.2719 | HE4; epididymis-specific, whey-acidic pr | 3.26 | 2533 5470 |
| 436557 | W15573 | Hs.5027 | ESTs, Weakly similar to A47582 B-cell gr | 3.26 | 2993 |
| 448045 | AJ297436 | Hs.20166 | prostate stem cell antigen | 3.26 | 3937 5706 |
| 409406 | H83092 | Hs.49605 | ESTs | 3.25 | 366 |
| 416677 | T83470 | Hs.334840 | ESTs, Moderately similar to I78885 serin | 3.25 | 1012 |
| 422771 | NM_012318 | Hs.120165 | leucine zipper-EF-hand containing transm | 3.25 | 1681 5158 |
| 435005 | U80743 | Hs.306094 | trinucleotide repeat containing 12 | 3.25 | 2886 5560 |
| 422134 | AW179019 | Hs.112110 | mitochondrial ribosomal protein L42 | 3.25 | 1608 |
| 442152 | R39246 | Hs.239666 | Homo sapiens cDNA FLJ13495 fis, clone PL | 3.25 | 3401 |
| 434804 | AA649530 | | gb: ns44f05.s1 NCI_CGAP_Alv1 Homo sapiens | 3.25 | 2866 |
| 422744 | AW268803 | Hs.119640 | hBKLF for basic kruppel like factor | 3.25 | 1678 |
| 422420 | U03398 | Hs.1524 | tumor necrosis factor (ligand) superfami | 3.25 | 1643 5150 |
| 435532 | AW291488 | Hs.117305 | Homo sapiens, clone IMAGE: 3682908, mRNA | 3.25 | 2923 |
| 429413 | NM_014058 | Hs.201877 | DESC1 protein | 3.25 | 2366 5405 |
| 404148 | | | NM_002944*: Homo sapiens v-ros avian UR2 | 3.25 | 4720 53 |
| 433183 | AF231338 | Hs.222024 | transcription factor BMAL2 | 3.25 | 2745 5531 |
| 414523 | AU076633 | Hs.76353 | serine (or cysteine) proteinase inhibito | 3.25 | 841 |
| 451418 | BE387790 | Hs.26369 | hypothetical protein FLJ20287 | 3.25 | 4221 |
| 427521 | AW973352 | | ESTs | 3.25 | 2159 |
| 411945 | AL033527 | Hs.92137 | L-myc-2 protein (MYCL2) | 3.25 | 4870 590 |
| 447155 | AA100605 | Hs.121557 | ESTs, Weakly similar to DP1_HUMAN POLYPO | 3.24 | 3827 |
| 452737 | AK001680 | Hs.30488 | DKFZP434F091 protein | 3.24 | 4340 5762 |
| 411263 | BE297802 | Hs.69360 | kinesin-like 6 (mitotic centromere-assoc | 3.24 | 544 |
| 435369 | BE385785 | Hs.323715 | methionine adenosyltransferase I, alpha | 3.24 | 2910 |
| 410741 | Z11695 | Hs.324473 | mitogen-activated protein kinase 1 | 3.23 | 4856 513 |
| 415192 | D17793 | Hs.78183 | aldo-keto reductase family 1, member C3 | 3.23 | 4942 914 |
| 455416 | AW937143 | | gb: PM1-DT0041-281299-001-f01 DT0041 Homo | 3.23 | 4507 |
| 458187 | D56919 | Hs.265848 | myomegalin | 3.23 | 4614 |
| 413129 | AF292100 | Hs.104613 | RP42 homolog | 3.23 | 4893 693 |
| 415992 | C05837 | Hs.145807 | hypothetical protein FLJ13593 | 3.23 | 964 |
| 416883 | AW140128 | Hs.184902 | ESTs | 3.23 | 1033 |
| 414013 | AA766605 | Hs.47099 | hypothetical protein FLJ21212 | 3.23 | 774 |
| 453454 | AW052006 | | PRP4/STK/WD splicing factor | 3.23 | 4407 |
| 426181 | AA371422 | Hs.334371 | hypothetical protein MGC13096 | 3.22 | 2037 |
| 436995 | AI160015 | Hs.125489 | ESTs | 3.22 | 3026 |
| 428878 | AA436884 | Hs.48926 | ESTs | 3.22 | 2315 |
| 411248 | AA551538 | Hs.69321 | Homo sapiens cDNA FLJ14408 fis, clone HE | 3.21 | 541 |
| 419381 | AB023420 | Hs.90093 | heat shock 70 kD protein 4 | 3.21 | 1308 5046 |
| 427490 | Z95152 | Hs.178695 | mitogen-activated protein kinase 13 | 3.21 | 2157 |
| 417601 | NM_014735 | Hs.82292 | KIAA0215 gene product | 3.21 | 1105 4991 |
| 440273 | AI805392 | Hs.325335 | Homo sapiens cDNA: FLJ23523 fis, clone L | 3.21 | 3274 |
| 404891 | | | Target Exon | 3.20 | |
| 438989 | AW979100 | | gb: EST391210 MAGE resequences, MAGP Homo | 3.20 | 3181 |
| 403416 | | | KIAA0564 protein | 3.20 | |
| 454731 | BE067650 | | gb: MR4-BT0358-090300-003-e01 BT0358 Homo | 3.20 | 4494 |
| 414888 | AL039185 | Hs.77558 | thyroid hormone receptor interactor 7 | 3.20 | 888 |
| 420650 | AA455706 | Hs.44581 | heat shock protein hsp70-related protein | 3.20 | 1441 |
| 448686 | AA158659 | Hs.334712 | hypothetical protein FLJ14744 | 3.20 | 3997 |
| 450728 | AW162923 | Hs.25363 | presenilin 2 (Alzheimer disease 4) | 3.20 | 4156 |
| 426581 | AB040956 | Hs.135890 | KIAA1523 protein | 3.20 | 2080 5311 |
| 442179 | AA983842 | Hs.333555 | chromosome 2 open reading frame 2 | 3.20 | 3404 |
| 422536 | AA311915 | Hs.187726 | gb: EST182621 Jurkat T-cells VI Homo sapi | 3.20 | 1654 |
| 447492 | AI381619 | Hs.20188 | ESTs | 3.20 | 3867 |
| 457292 | AI921270 | Hs.281462 | hypothetical protein FLJ14251 | 3.20 | 4586 |
| 449704 | AK000733 | Hs.23900 | GTPase activating protein | 3.20 | 4076 5722 |
| 442577 | AA292998 | Hs.163900 | ESTs | 3.20 | 3447 |
| 423942 | AF209704 | Hs.169407 | glycolipid transfer protein | 3.20 | 1785 5190 |
| 439696 | W95298 | Hs.171882 | ESTs | 3.19 | 3230 |
| 409142 | AL136877 | Hs.50758 | SMC4 (structural maintenance of chromoso | 3.19 | 340 4814 |
| 446639 | AI016826 | Hs.342148 | ESTs | 3.19 | 3774 |
| 452144 | AA032197 | Hs.102558 | Homo sapiens, clone MGC: 5352, mRNA, comp | 3.18 | 4275 |
| 446054 | AB014537 | Hs.13604 | KIAA0637 gene product | 3.18 | 3722 5664 |
| 452126 | AI859947 | Hs.314158 | ESTs, Weakly similar to I38022 hypotheti | 3.18 | 4274 |
| 426108 | AA622037 | Hs.166468 | programmed cell death 5 | 3.18 | 2028 |
| 451621 | AI879148 | Hs.26770 | fatty acid binding protein 7, brain | 3.17 | 4235 |
| 433913 | AI694106 | Hs.72325 | ESTs, Weakly similar to I38022 hypotheti | 3.17 | 2797 |
| 427254 | AL121523 | Hs.97774 | ESTs | 3.16 | 2135 |
| 430361 | AI033965 | Hs.239926 | sterol-C4-methyl oxidase-like | 3.16 | 2476 |
| 450065 | AL050107 | Hs.24341 | transcriptional co-activator with PDZ-bi | 3.16 | 4102 5725 |
| 420090 | AA220238 | Hs.94986 | ribonuclease P (38 kD) | 3.16 | 1383 |
| 436481 | AA379597 | Hs.5199 | HSPC150 protein similar to ubiquitin-con | 3.16 | 2988 |
| 435652 | N32388 | Hs.334370 | uncharacterized hypothalamus protein HBE | 3.15 | 2935 |
| 453905 | NM_002314 | Hs.36566 | LIM domain kinase 1 | 3.15 | 4450 5788 |
| 454425 | AW300927 | Hs.27192 | hypothetical protein dJ1057B20.2 | 3.15 | 4482 |
| 425419 | AJ002078 | Hs.157144 | syntaxin 6 | 3.15 | 1961 5262 |
| 414271 | AK000275 | Hs.75871 | protein kinase C binding protein 1 | 3.15 | 807 |
| 455751 | BE075281 | | gb: PM1-BT0585-290200-005-d07 BT0585 Homo | 3.15 | 4521 |
| 408673 | BE208517 | | ribosomal protein L37a | 3.15 | 292 |
| 405031 | | | solute carrier family 22 (organic cation | 3.15 | |
| 401216 | | | C12000969: gi\|7662320\|ref\|NP_055628.1\| KI | 3.15 | |
| 409463 | AI458165 | Hs.17296 | hypothetical protein MGC2376 | 3.15 | 375 |
| 418506 | AA084248 | Hs.85339 | Unknown protein for MGC: 29643 (formerly | 3.15 | 1208 |
| 414396 | BE548266 | Hs.76057 | galactose-4-epimerase, UDP- | 3.14 | 821 |
| 418113 | AI272141 | Hs.83484 | SRY (sex determining region Y)-box4 | 3.14 | 1161 |
| 433257 | AA613437 | Hs.302743 | hypothetical protein FLJ12543 | 3.14 | 2751 |
| 442445 | AA082665 | Hs.209561 | KIAA1715 protein | 3.13 | 3431 |
| 428375 | T65153 | Hs.104613 | ESTs | 3.13 | 2246 |
| 430713 | AA351647 | Hs.2642 | eukaryotic translation elongation factor | 3.13 | 2508 |
| 421116 | T19132 | Hs.101850 | retinol-binding protein 1, cellular | 3.13 | 1482 |
| 434573 | AW372340 | Hs.14337 | ESTs | 3.13 | 2850 |
| 448102 | AI750793 | Hs.20295 | CHK1 (checkpoint, S.pombe) homolog | 3.13 | 3942 |
| 425159 | NM_004341 | Hs.154868 | carbamoyl-phosphate synthetase 2, aspart | 3.12 | 1931 5249 |
| 451336 | AI264643 | Hs.3610 | ESTs | 3.12 | 4212 |
| 423613 | AF036035 | Hs.129910 | hyaluronoglucosaminidase 3 | 3.12 | 1761 5183 |
| 430317 | AB020645 | Hs.239189 | glutaminase | 3.12 | 2471 5446 |
| 423541 | AA296922 | Hs.129778 | serine protease inhibitor, Kazal type 4 | 3.12 | 1756 |
| 403851 | | | C5002154*: gi\|7299015\|gb\|AAF54217.1\| (AE0 | 3.12 | |
| 418422 | AW440068 | Hs.59425 | hypothetical protein FLJ23323 | 3.11 | 1199 |
| 427709 | AI631811 | Hs.180403 | STRIN protein | 3.10 | 2186 |
| 440546 | AI491994 | | gb: to07g09.x1 NCl_CGAP_Ut2 Homo sapiens | 3.10 | 3298 |
| 437605 | AW452716 | Hs.13328 | hypothetical protein FLJ20421 | 3.10 | 3074 |
| 442543 | AI869950 | Hs.216039 | ESTs | 3.10 | 3438 |
| 434438 | AI654867 | | hemoglobin, beta | 3.10 | 2840 |
| 410627 | AA181339 | Hs.929 | myosin, heavy polypeptide 7, cardiac mus | 3.10 | 499 |
| 449505 | AI653006 | Hs.195374 | ESTs | 3.10 | 4063 |
| 455510 | AA422029 | Hs.143640 | ESTs, Weakly similar to hyperpolarizatio | 3.10 | 4512 |
| 446715 | AI337735 | Hs.173919 | ESTs, Moderately similar to ZN91_HUMAN Z | 3.10 | 3778 |
| 424539 | L02911 | Hs.150402 | Activin A receptor, type I (ACVR1) (ALK | 3.10 | 1857 5216 |
| 414040 | N58513 | Hs.32171 | ESTs | 3.10 | 776 |
| 443054 | AI745185 | Hs.84520 | yes-associated protein 65 kDa | 3.10 | 3491 |
| 425641 | D79758 | Hs.14355 | Homo sapiens cDNA FLJ13207 fis, clone NT | 3.10 | 1981 |
| 423642 | AW452650 | Hs.157148 | hypothetical protein MGC13204 | 3.10 | 1763 |
| 459647 | R34107 | Hs.321450 | pregnancy specific beta-1-glycoprotein 1 | 3.10 | 4675 |
| 422005 | BE266556 | Hs.110702 | Homo sapiens mRNA; cDNA DKFZp761E212 (fr | 3.10 | 1592 |
| 431868 | BE246400 | Hs.285176 | acetyl-Coenzyme A transporter | 3.10 | 2611 |
| 442530 | AI580830 | Hs.176508 | Homo sapiens cDNA FLJ14712 fis, clone NT | 3.10 | 3437 |
| 433819 | AW511097 | Hs.112765 | ESTs | 3.10 | 2789 |
| 453377 | AI679149 | Hs.167186 | ESTs | 3.10 | 4402 |
| 449000 | U69560 | Hs.3826 | kelch-like protein C3IP1 | 3.10 | 4025 |
| 411943 | BE502436 | Hs.7962 | ESTs, Weakly similar to S44608 C02F5.6 p | 3.10 | 589 |
| 421610 | AA393168 | Hs.90034 | hypothetical protein FLJ21916 | 3.10 | 1544 |
| 422947 | AA306782 | Hs.122552 | G-2 and S-phase expressed 1 | 3.10 | 1696 |
| 434669 | AF151534 | Hs.92023 | core histone macroH2A2.2 | 3.09 | 2860 5552 |
| 437108 | AA434054 | Hs.80624 | hypothetical protein MGC2560 | 3.09 | 3034 |
| 445033 | AV652402 | Hs.72901 | cyclin-dependent kinase inhibitor 2B (p1 | 3.09 | 3647 |
| 445138 | H99085 | | gb: yx18c06.s1 Soares melanocyte 2NbHM Ho | 3.09 | 3655 |
| 429901 | AK000502 | Hs.56237 | hypothetical protein FLJ20495 | 3.09 | 2424 5429 |
| 420028 | AB014680 | Hs.8786 | carbohydrate (N-acetylglucosamine-6-O) s | 3.09 | 1374 5060 |
| 436440 | AI471862 | Hs.196008 | Homo sapiens cDNA FLJ11723 fis, clone HE | 3.09 | 2985 |
| 442366 | AA115629 | Hs.118531 | ESTs | 3.09 | 3425 |
| 422684 | BE561617 | Hs.119192 | H2A histone family, member Z | 3.09 | 1673 |
| 412122 | AW852707 | | G-rich RNA sequence binding factor 1 | 3.09 | 609 |
| 440967 | AK002092 | Hs.7570 | hypothetical protein FLJ11230 | 3.08 | 3322 5615 |
| 410211 | NM_014347 | Hs.296365 | zinc finger protein | 3.08 | 456 4841 |
| 447245 | AK001713 | Hs.17860 | hypothetical protein FLJ10851 | 3.08 | 3834 5684 |
| 422385 | BE549407 | Hs.115823 | ribonuclease P, 40 kD subunit | 3.08 | 1637 |
| 437158 | AW090198 | | KIAA1150 protein | 3.07 | 3039 |
| 424395 | AA165082 | Hs.146388 | microtubute-associated protein 7 | 3.07 | 1839 |
| 418478 | U38945 | Hs.1174 | cyclin-dependent kinase inhibitor 2A (me | 3.07 | 1204 5017 |
| 428423 | AU076517 | Hs.184276 | solute carrier family 9 (sodium/hydrogen | 3.07 | 2254 |
| 429504 | X99133 | Hs.204238 | lipocalin 2 (oncogene 24p3) (NGAL) | 3.07 | 2382 5411 |
| 444700 | NM_003645 | Hs.11729 | fatty-acid-Coenzyme A ligase, very long- | 3.06 | 3620 5642 |
| 442092 | AW578669 | | hypothetical protein FLJ12439 | 3.06 | 3397 |
| 432201 | AI538613 | Hs.298241 | Transmembrane protease, serine 3 | 3.06 | 2643 |
| 446390 | AA233393 | Hs.14992 | hypothetical protein FLJ11151 | 3.05 | 3749 |
| 430396 | D49742 | Hs.241363 | hyaluronan-binding protein 2 | 3.05 | 2481 5450 |
| 446440 | AV658411 | Hs.42656 | KIAA1681 protein | 3.05 | 3751 |
| 429873 | AW268693 | Hs.105713 | ESTs | 3.05 | 2420 |
| 401203 | | | Target Exon | 3.05 | |
| 458059 | AW015588 | Hs.137232 | ESTs, Weakly similar to S65657 alpha-1C- | 3.05 | 4607 |
| 417975 | AA641836 | Hs.30085 | hypothetical protein FLJ23186 | 3.05 | 1143 |
| 459672 | Z18867 | Hs.326843 | gb: HSDHEGC03 Stratagene cDNA library Hum | 3.05 | 4676 |
| 451365 | AI791783 | Hs.16063 | ESTs, Weakly similar to ALU8_HUMAN ALU S | 3.05 | 4215 |
| 450687 | AA495800 | | gb: zw05b07.s1 Soares_NhHMPu_S1 Homo sapi | 3.05 | 4149 |
| 410976 | R36207 | Hs.25092 | hypothetical protein MGC10744 | 3.05 | 525 |
| 441318 | AI078234 | | ESTs | 3.05 | 3345 |
| 433553 | AA825523 | | ESTs, Weakly similar to I38022 hypotheti | 3.05 | 2767 |
| 447437 | U07225 | Hs.339 | purinergic receptor P2Y, G-protein coupl | 3.05 | 3861 5688 |
| 454442 | AW816134 | Hs.132967 | gb: MR3-ST0220-290100-016-e04 ST0220 Homo | 3.05 | 4484 |
| 407876 | NM_004519 | Hs.40866 | potassium voltage-gated channel, KQT-lik | 3.05 | 210 4784 |
| 410507 | AA355288 | | transitional epithelia response protein | 3.05 | 486 |
| 404440 | | | NM_021048: Homo sapiens melanoma antigen, | 3.05 | 4721 54 |
| 419865 | NM_007020 | Hs.93502 | U1-snRNP binding protein homolog (70 kD) | 3.05 | 1364 5058 |
| 410561 | BE540255 | Hs.6994 | Homo sapiens cDNA: FLJ22044 fis, clone H | 3.05 | 493 |
| 418248 | NM_005000 | Hs.83916 | NM_005000*: Homo sapiens NADH dehydrogena | 3.05 | 1172 5005 |
| 450824 | R09055 | Hs.22011 | ESTs, Weakly similar to I38022 hypotheti | 3.05 | 4169 |
| 426216 | N77630 | Hs.13895 | Homo sapiens cDNA FLJ11654 fis, clone HE | 3.05 | 2040 |
| 443098 | AI247833 | Hs.139265 | ESTs, Moderately similar to ALU1_HUMAN A | 3.04 | 3496 |
| 414388 | BE281412 | | gb: 601154911F1 NIH_MGC_21 Homo sapiens c | 3.04 | 819 |
| 427308 | D26067 | Hs.174905 | KIAA0033 protein | 3.04 | 2141 5335 |
| 451035 | AU076785 | Hs.430 | plastin 1 (I isoform) | 3.04 | 4184 |
| 440726 | AL050333 | Hs.306425 | DKFZPS64B116 protein | 3.04 | 3315 |
| 441991 | AW844404 | Hs.126901 | Homo sapiens mRNA full length insert cDN | 3.04 | 3386 |
| 433090 | AI720050 | | immortalization-upregulated protein | 3.04 | 2734 |
| 407792 | AI077715 | Hs.39384 | putative secreted ligand homologous to f | 3.04 | 196 |
| 435641 | AI147545 | Hs.114172 | ESTs | 3.03 | 2933 |
| 417542 | J04129 | Hs.82269 | progestagen-associated endometrial prote | 3.03 | 1101 4990 |
| 425997 | AK000086 | Hs.165948 | hypothetical protein FLJ20079 | 3.03 | 2018 5286 |
| 439924 | AI985897 | Hs.125293 | ESTs | 3.03 | 3242 |
| 453968 | AA847843 | Hs.62711 | High mobility group (nonhistone chromoso | 3.03 | 4456 |
| 415015 | NM_002109 | Hs.77798 | histidyl-tRNA synthetase | 3.02 | 4939 901 |
| 400183 | | | Eos Control | 3.02 | |
| 448826 | AI580252 | Hs.293246 | ESTs, Weakly similar to putative p150 [H | 3.01 | 4012 |
| 420085 | AI741909 | Hs.44680 | hypothetical protein FLJ20979 | 3.01 | 1381 |
| 429248 | U96759 | Hs.198307 | von Hippel-Lindau binding protein 1 | 3.01 | 2342 5396 |
| 409892 | AW956113 | Hs.7149 | gb: EST368183 MAGE resequences, MAGD Homo | 3.00 | 414 |
| 405942 | | | Target Exon | 3.00 | |
| 455286 | BE144384 | | gb: MR0-HT0166-191199-004-c11 HT0166 Homo | 3.00 | 4504 |
| 420301 | AA767526 | Hs.22030 | paired box gene 5 (B-cell lineage specif | 3.00 | 1407 |
| 407382 | AA503620 | | gb: ne49b08.s1 NCI_CGAP_Co3 Homo sapiens | 3.00 | 161 |
| 403011 | | | ENSP00000215330*: Probable serine/threoni | 3.00 | |
| 445076 | AI206888 | Hs.154131 | ESTs | 3.00 | 3650 |
| 418857 | D10216 | Hs.89394 | POU domain, class 1, transcription facto | 3.00 | 1250 5031 |
| 426572 | AB037783 | Hs.170623 | hypothetical protein FLJ11183 | 3.00 | 2079 5310 |
| 411506 | T75366 | Hs.146286 | kinesin family member 13A | 3.00 | 558 |
| 434301 | AF124512 | Hs.221660 | blood vessel epicardial substance | 3.00 | 2827 5545 |
| 412530 | AA766268 | Hs.266273 | hypothetical protein FLJ13346 | 3.00 | 843 |
| 403882 | | | Target Exon | 3.00 | |
| 458918 | H58499 | Hs.252692 | ESTs, Weakly similar to I38022 hypotheti | 3.00 | 4646 |
| 445704 | AI493742 | Hs.167700 | ESTs, Moderately similar to I38022 hypot | 3.00 | 3694 |
| 438703 | AI803373 | Hs.31599 | ESTs | 3.00 | 3159 |
| 451378 | BE153447 | | gb: PM2-HT0338-131299-001-b01 HT0338 Homo | 3.00 | 4217 |
| 444165 | AL137443 | Hs.10441 | hypothetical protein FLJ11236 | 3.00 | 3579 |
| 403532 | | | NM_024638: Homo sapiens hypothetical prot | 3.00 | 46 4715 |
| 453468 | W00712 | Hs.32990 | DKFZP566F084 protein | 3.00 | 4411 |
| 440278 | BE560870 | Hs.9052 | ESTs, Weakly similar to 2004399A chromos | 3.00 | 3276 |
| 456251 | R13326 | Hs.328475 | ESTs | 3.00 | 4534 |
| 425673 | R70318 | Hs.339730 | ESTs | 3.00 | 1985 |
| 442619 | AA447492 | Hs.20183 | ESTs, Weakly similar to AF164793 1 prote | 3.00 | 3455 |
| 459119 | AW844498 | Hs.306121 | CDC20 (cell division cycle 20, S. cerevi | 3.00 | 4657 |
| 455440 | AW946022 | | gb: QV0-ET0001-050500-229-b08 ET0001 Homo | 3.00 | 4508 |
| 413832 | AI913647 | Hs.131886 | Homo sapiens cDNA: FLJ22113 fis, clone H | 3.00 | 755 |
| 421515 | Y11339 | Hs.105352 | GalNAc alpha-2,6-sialyltransferase 1, l | 3.00 | 1532 5113 |
| 437994 | U92012 | Hs.251659 | ESTs, Weakly similar to mariner transpos | 3.00 | 3114 |
| 418827 | BE327311 | Hs.47166 | HT021 | 3.00 | 1245 |
| 420610 | AI683183 | Hs.99348 | distal-less homeo box 5 | 3.00 | 1437 |
| 401435 | | | C14000397*: gi\|7499898\|pir\|\|T33295 hypoth | 3.00 | 26 |
| 447072 | D61594 | Hs.17279 | tyrosylprotein sulfotransferase 1 | 3.00 | 3817 |
| 411975 | AI916058 | Hs.144583 | 3′UTR of: dead ringer (Drosophila)-like | 2.99 | 596 |
| 400965 | | | C11002190: gi\|12737279\|ref\|XP_012163.1\| | 2.99 | |
| 430594 | AK000790 | Hs.246885 | hypothetical protein FLJ20783 | 2.98 | 2498 5458 |
| 436469 | AK001455 | Hs.5198 | Down syndrome critical region gene 2 | 2.98 | 2986 |
| 421433 | AI829192 | Hs.22380 | ESTs | 2.98 | 1518 |
| 407756 | AA116021 | Hs.38260 | ubiquitin specific protease 18 | 2.98 | 191 |
| 433658 | L03678 | Hs.156110 | immunoglobulin kappa constant | 2.98 | 2778 5539 |
| 449969 | AW295142 | Hs.180187 | Homo sapiens cDNA FLJ14337 fis, clone PL | 2.98 | 4094 |
| 441962 | AW972542 | Hs.289008 | Homo sapiens cDNA: FLJ21814 fis, clone H | 2.97 | 3384 |
| 432241 | AI937060 | Hs.6298 | KIAA1151 protein | 2.97 | 2648 |
| 412560 | R24601 | | CCR4-NOT transcription complex, subunit | 2.97 | 645 |
| 433323 | AA805132 | Hs.159142 | ESTs | 2.97 | 2755 |
| 447444 | AK000318 | Hs.18616 | hypothetical protein FLJ20311 | 2.97 | 3862 5689 |
| 425465 | L18964 | Hs.1904 | protein kinase C, iota | 2.97 | 1969 5266 |
| 410337 | M83822 | Hs.62354 | cell division cycle 4-like | 2.97 | 465 4845 |
| 424800 | AL035588 | Hs.153203 | MyoD family inhibitor | 2.97 | 1888 5232 |
| 406709 | AI355761 | Hs.242463 | keratin 8 | 2.96 | 91 |
| 411412 | AJ001388 | Hs.69997 | zinc finger protein 238 | 2.96 | 4864 554 |
| 426761 | AI015709 | Hs.172089 | PORIMIN Pro-oncosis receptor inducing me | 2.96 | 2095 |
| 456564 | AW747802 | | gb: QV1-BN0003-061299-040-b09 BN0003 Homo | 2.96 | 4550 |
| 437273 | AL137451 | Hs.120873 | ESTs, Highly similar to T46266 hypotheti | 2.96 | 3053 5564 |
| 426820 | U73328 | Hs.172648 | distal-less homeobox 4 | 2.96 | 2102 5322 |
| 449209 | BE616830 | Hs.294145 | ESTs | 2.96 | 4046 |
| 402025 | | | NM_021624: Homo sapiens histamine H4 rece | 2.95 | 32 4702 |
| 416178 | AI808527 | Hs.192822 | serologically defined breast cancer anti | 2.95 | 978 |
| 446719 | W39500 | Hs.301872 | hypothetical protein MGC4840 | 2.95 | 3779 |
| 428500 | AI815395 | Hs.184641 | fatty acid desaturase 2 | 2.95 | 2266 |
| 417879 | R22128 | | gb: yh25h08.r1 Soares placenta Nb2HP Homo | 2.95 | 1134 |
| 404173 | | | Target Exon | 2.95 | |
| 404819 | | | NM_002688*: Homo sapiens peanut (Drosophi | 2.95 | 4728 62 |
| 448718 | AA220235 | Hs.153959 | hypothetical protein MGC15436 | 2.95 | 4000 |
| 402270 | | | Target Exon | 2.95 | |
| 420362 | U79734 | Hs.97206 | huntingtin interacting protein 1 | 2.95 | 1417 5075 |
| 451815 | AW974911 | Hs.184793 | Homo sapiens cDNA: FLJ21880 fis, clone H | 2.95 | 4250 |
| 445921 | AW015211 | Hs.146181 | ESTs | 2.95 | 3712 |
| 429412 | NM_006235 | Hs.2407 | POU domain, class 2, associating factor | 2.95 | 2365 5404 |
| 442875 | BE623003 | Hs.23625 | Homo sapiens clone TCCCTA00142 mRNA sequ | 2.95 | 3477 |
| 407804 | AF228603 | Hs.39957 | pleckstrin 2 (mouse) homolog | 2.95 | 197 4783 |
| 420569 | AA278362 | Hs.289062 | Homo sapiens cDNA FLJ12334 fis, clone MA | 2.95 | 1433 |
| 436389 | AI811706 | Hs.42733 | CHMP1.5 protein | 2.95 | 2981 |
| 424581 | M62062 | Hs.150917 | catenin (cadherin-associated protein), a | 2.95 | 1861 |
| 406749 | AW193917 | Hs.217493 | annexin A2 | 2.95 | 96 |
| 418295 | AW970043 | Hs.238039 | hypothetical protein FLJ11090 | 2.95 | 1177 |
| 431310 | AW327889 | Hs.252433 | Homo sapiens cDNA FLJ13794 fis, clone TH | 2.95 | 2545 |
| 434698 | BE044674 | | gb: hm46f02.x1 NCI_CGAP_RDF1 Homo sapiens | 2.95 | 2861 |
| 430316 | NM_000875 | Hs.239176 | insulin-like growth factor 1 receptor | 2.95 | 2470 5445 |
| 439210 | AA641928 | Hs.194071 | ESTs, Weakly similar to unnamed protein | 2.95 | 3192 |
| 414052 | AW578849 | Hs.283552 | ESTs, Weakly similar to unnamed protein | 2.95 | 779 |
| 418304 | AA215702 | | gb: zr97g10.r1 NCI_CGAP_GCB1 Homo sapiens | 2.95 | 1178 |
| 440327 | R12581 | Hs.191146 | ESTs | 2.94 | 3282 |
| 431707 | R21326 | Hs.267905 | hypothetical protein FLJ10422 | 2.94 | 2587 |
| 458898 | AW295097 | Hs.200260 | ESTs | 2.93 | 4644 |
| 408471 | NM_012317 | Hs.45231 | leucine zipper, down-regulated in cancer | 2.93 | 269 4797 |
| 418526 | BE019020 | Hs.85838 | solute carrier family 16 (monocarboxylic | 2.93 | 1211 |
| 446111 | W56338 | Hs.13880 | CGI-143 protein | 2.93 | 3725 |
| 410444 | W73464 | Hs.132554 | gb: zd54e04.s1 Soares_fetal_heart_NbHH19W | 2.93 | 480 |
| 439396 | BE562958 | Hs.74346 | hypothetical protein MGC14353 | 2.92 | 3205 |
| 433627 | AF078866 | Hs.284296 | Homo sapiens cDNA: FLJ22993 fis, clone K | 2.92 | 2774 5538 |
| 425683 | AB037813 | Hs.159200 | hypothetical protein DKFZp762K222 | 2.92 | 1987 5275 |
| 452480 | AI903526 | | gb: RC-BT031-090199-063 BT031 Homo sapien | 2.91 | 4314 |
| 458247 | R14439 | Hs.209194 | ESTs | 2.91 | 4617 |
| 410682 | H07103 | Hs.286014 | Homo sapiens, clone IMAGE: 3867243, mRNA | 2.91 | 505 |
| 445733 | BE295568 | Hs.13225 | UDP-Gal: betaGlcNAc beta 1,4-galactosylt | 2.91 | 3696 |
| 429986 | AF092047 | Hs.227277 | sine oculis homeobox (Drosophila) homolo | 2.91 | 2434 5431 |
| 419638 | N46504 | Hs.91747 | profilin 2 | 2.91 | 1341 |
| 414983 | L17128 | Hs.77719 | gamma-glutamyl carboxylase | 2.91 | 4937 897 |
| 442643 | U82756 | | PRP4/STK/WD splicing factor | 2.90 | 3457 5623 |
| 416361 | AW204907 | Hs.6872 | ESTs, Weakly similar to CA13_HUMAN COLLA | 2.90 | 989 |
| 437575 | AW954355 | Hs.36529 | hypothetical protein MGC11242 | 2.90 | 3069 |
| 431214 | AA294921 | Hs.348024 | v-ral simian leukemia viral oncogene hom | 2.90 | 2541 |
| 414064 | BE245289 | Hs.16165 | expressed in activated T/LAK lymphocytes | 2.90 | 784 |
| 446258 | AI283476 | Hs.263478 | ESTs | 2.90 | 3740 |
| 404607 | | | Target Exon | 2.90 | |
| 414094 | H15088 | Hs.31433 | ESTs | 2.90 | 787 |
| 443833 | AI654108 | Hs.135125 | ESTs | 2.90 | 3558 |
| 442712 | BE465168 | Hs.131011 | ESTs | 2.90 | 3461 |
| 411887 | AW182924 | Hs.128790 | ESTs | 2.90 | 584 |
| 405366 | | | NM_003371*: Homo sapiens vav 2 oncogene ( | 2.90 | 4735 69 |
| 404624 | | | karyopherin (importin) beta 3 | 2.90 | |
| 411387 | AW842339 | Hs.130815 | hypothetical protein FLJ21870 | 2.90 | 550 |
| 408990 | AL022395 | Hs.49526 | f-box and leucine-rich repeat protein 4 | 2.90 | 321 4810 |
| 417288 | AI984792 | Hs.108812 | hypothetical protein RLJ22004 | 2.90 | 1077 |
| 419465 | AW500239 | Hs.21187 | Homo sapiens cDNA: FLJ23068 fis, clone L | 2.90 | 1316 |
| 459010 | AA331438 | | gb: EST35269 Embryo, 8 week I Homo sapien | 2.90 | 4652 |
| 445008 | AW373754 | | gb: QV4-BT0536-291299-065-e01 BT0536 Homo | 2.90 | 3645 |
| 412170 | D16532 | Hs.73729 | very low density lipoprotein receptor | 2.90 | 4875 615 |
| 419752 | AA249573 | Hs.152618 | ESTs, Moderately similar to ZN91_HUMAN Z | 2.90 | 1358 |
| 419497 | NM_006410 | Hs.90753 | Tat-interacting protein (30 kD) | 2.90 | 1320 5050 |
| 423849 | AL157425 | Hs.133315 | Homo sapiens mRNA; cDNA DKFZp761J1324 (f | 2.90 | 1780 |
| 452909 | NM_015368 | Hs.30985 | pannexin 1 | 2.90 | 4358 5767 |
| 428560 | AI243209 | Hs.98669 | ESTs, Weakly similar to B47411 ADPribosy | 2.90 | 2270 |
| 413429 | BE139117 | Hs.278881 | ESTs | 2.90 | 719 |
| 426126 | AL118747 | Hs.26691 | AY046419: Homo sapiens glucose transport | 2.89 | 2030 |
| 409693 | AA010233 | Hs.55921 | glutamyl-prolyl-tRNA synthetase | 2.89 | 394 |
| 407242 | M18728 | | gb: Human nonspecific crossreacting antig | 2.89 | 142 4766 |
| 412174 | C04144 | Hs.172753 | ESTs | 2.89 | 616 |
| 447541 | AK000288 | Hs.18800 | hypothetical protein FLJ20281 | 2.88 | 3877 5691 |
| 409264 | NM_014937 | Hs.52463 | KIAA0966 protein | 2.88 | 356 4820 |
| 453063 | W47196 | Hs.166172 | aryl hydrocarbon receptor nuclear transl | 2.88 | 4371 |
| 431865 | AA521106 | Hs.136375 | ESTs, Weakly similar to S65824 reverse t | 2.88 | 2610 |
| 409231 | AA446644 | Hs.692 | GA733-2 antigen; epithelial glycoprotein | 2.88 | 353 |
| 424364 | AW383226 | Hs.163834 | ESTs, Weakly similar to G01763 atrophin- | 2.87 | 1835 |
| 408713 | NM_001248 | Hs.47042 | ectonucleoside triphosphate diphosphohyd | 2.87 | 296 4804 |
| 406972 | M32053 | | gb: Human H19 RNA gene, complete cds. | 2.87 | 115 |
| 404901 | | | NM_025213: Homo sapiens spectrin, beta, n | 2.87 | 4730 64 |
| 422939 | AW394055 | Hs.98427 | ESTs, Weakly similar to I38022 hypotheti | 2.87 | 1695 |
| 449824 | AI962552 | Hs.226765 | ESTs | 2.87 | 4086 |
| 409728 | AW883968 | Hs.321190 | ESTs | 2.87 | 401 |
| 418867 | D31771 | Hs.89404 | msh (Drosophila) homeo box homolog 2 | 2.87 | 1252 5032 |
| 429492 | W21183 | Hs.13205 | ESTs | 2.87 | 2378 |
| 429023 | NM_000312 | Hs.2351 | protein C (inactivator of coagulation fa | 2.86 | 2325 5387 |
| 416612 | H70565 | | gb: yr97c04.r1 Soares fetal liver spleen | 2.86 | 1007 |
| 440457 | BE387593 | Hs.21321 | Homo sapiens clone FLB9213 PRO2474 mRNA, | 2.86 | 3289 |
| 446620 | AA128808 | Hs.179902 | transporter-like protein | 2.86 | 3771 |
| 413517 | N76712 | Hs.44829 | ESTs, Weakly similar to I38022 hypotheti | 2.86 | 730 |
| 448475 | BE613134 | Hs.247474 | hypothetical protein FLJ21032 | 2.86 | 3973 |
| 433167 | AB037682 | Hs.195715 | hypothetical protein MGC4827 | 2.86 | 2744 5530 |
| 406137 | | | NM_000179*: Homo sapiens mutS (E. coli) h | 2.85 | 4742 76 |
| 457094 | AI360119 | Hs.181013 | phosphoglycerate mutase 1 (brain) | 2.85 | 4577 |
| 428792 | BE535955 | Hs.193602 | chromosome condensation protein G | 2.85 | 2300 |
| 410305 | AF030409 | Hs.62185 | solute carrier family 9 (sodium/hydrogen | 2.85 | 463 4843 |
| 408253 | AW807476 | Hs.21051 | Homo sapiens mRNA for FLJ00012 protein, | 2.85 | 250 |
| 430355 | NM_006219 | Hs.239818 | phosphoinositide-3-kinase, catalytic, be | 2.85 | 2475 5449 |
| 436854 | AA749167 | Hs.173911 | ESTs | 2.85 | 3010 |
| 412783 | BE276738 | Hs.74578 | DEAD/H (Asp-Glu-Ala-Asp/His) box polypep | 2.85 | 669 |
| 406303 | | | C16000922: gi\|7499103\|pir\|\|T20903 hypothe | 2.85 | 77 |
| 432917 | NM_014125 | Hs.241517 | PRO0327 protein | 2.85 | 2712 5518 |
| 430452 | AI888450 | Hs.174644 | hypothetical protein FLJ21669 | 2.85 | 2486 |
| 422805 | AA436989 | Hs.121017 | H2A histone family, member A | 2.85 | 1683 |
| 441642 | H85686 | Hs.7922 | HSPC154 protein | 2.85 | 3364 |
| 443614 | AV655386 | Hs.7645 | fibrinogen, B beta polypeptide | 2.85 | 3532 |
| 419270 | NM_005232 | Hs.89839 | EphA1 | 2.85 | 1295 5042 |
| 448807 | AI571940 | Hs.7549 | ESTs | 2.85 | 4009 |
| 413838 | AV661185 | Hs.75574 | mitochondrial ribosomal protein L19 | 2.85 | 757 |
| 412831 | AA121352 | Hs.143314 | ESTs | 2.85 | 676 |
| 429370 | C19097 | Hs.89709 | glutamate-cysteine ligase, modifier subu | 2.85 | 2361 |
| 438895 | AW007021 | Hs.82894 | ESTs | 2.85 | 3176 |
| 440516 | S42303 | Hs.161 | cadherin 2, type 1, N-cadherin (neuronal | 2.84 | 3294 5608 |
| 451721 | NM_006946 | Hs.26915 | spectrin, beta, non-erythrocytic 2 | 2.84 | 4242 5749 |
| 407813 | AL120247 | Hs.40109 | KIAA0872 protein | 2.84 | 200 |
| 417386 | AL037228 | Hs.82043 | D123 gene product | 2.84 | 1090 |
| 441021 | AW578716 | Hs.7644 | H1 histone family, member 2 | 2.84 | 3326 |
| 444184 | T87841 | Hs.282990 | Human DNA sequence from clone RP1-28H20 | 2.84 | 3581 |
| 416946 | NM_012324 | | mitogen-activated protein kinase 8 inter | 2.84 | 1041 4971 |
| 432734 | AA837396 | Hs.263925 | LIS1-interacting protein NUDE1, rat Homo | 2.84 | 2696 |
| 426779 | AA384577 | Hs.93714 | ESTs, Weakly similar to T00365 hypotheti | 2.84 | 2097 |
| 437679 | NM_014214 | Hs.5753 | inositol(myo)-1(or 4)-monophosphatase 2 | 2.84 | 3082 5590 |
| 427722 | AK000123 | Hs.180479 | hypothetical protein FLJ20116 | 2.84 | 2190 5344 |
| 423692 | BE621056 | Hs.131731 | hypothetical protein FLJ11099 | 2.83 | 1768 |
| 445654 | X91247 | Hs.13046 | thioredoxin reductase 1 | 2.83 | 3691 5658 |
| 415276 | U88666 | Hs.78353 | SFRS protein kinase 2 | 2.83 | 4945 922 |
| 429038 | AL023513 | Hs.194766 | seizure related gene 6 (mouse)-like | 2.83 | 2327 5388 |
| 432375 | BE536069 | Hs.2962 | S100 calcium-binding protein P | 2.82 | 2661 |
| 424481 | R19453 | Hs.1787 | proteolipid protein 1 (Pelizaeus-Merzbac | 2.82 | 1851 |
| 418027 | AB037807 | Hs.83293 | hypothetical protein | 2.82 | 1149 5000 |
| 429978 | AA249027 | | ribosomal protein S6 | 2.82 | 2433 |
| 421486 | AW408800 | Hs.104859 | hypothetical protein DKFZp762E1312 | 2.82 | 1525 |
| 436972 | AA284679 | Hs.25640 | claudin 3 | 2.82 | 3024 |
| 437786 | BE142681 | Hs.155573 | polymerase (DNA directed), eta | 2.81 | 3091 |
| 438881 | AA827691 | Hs.129967 | ESTs, Weakly similar to ALU1_HUMAN ALU S | 2.81 | 3175 |
| 408901 | AK001330 | Hs.48855 | hypothetical protein FLJ10468 | 2.81 | 316 4808 |
| 416984 | H38765 | Hs.80706 | diaphorase (NADH/NADPH) (cytochrome b-5 | 2.81 | 1047 |
| 422559 | AW247696 | Hs.155839 | hypothetical protein MGC12934 | 2.81 | 1656 |
| 422259 | AA307584 | | gb: EST178498 Colon carcinoma (HCC) cell | 2.81 | 1623 |
| 448789 | BE539108 | Hs.22051 | hypothetical protein MGC15548 | 2.81 | 4007 |
| 453164 | F33692 | Hs.32018 | SNARE associated protein snapin | 2.81 | 4381 |
| 414670 | BE409525 | Hs.902 | neurofibromin 2 (bilateral acoustic neur | 2.81 | 860 |
| 424971 | AA479005 | Hs.154036 | tumor suppressing subtransferable candid | 2.81 | 1903 |
| 417381 | AF164142 | Hs.82042 | solute carrier family 23 (nucleobase tra | 2.80 | 1089 4983 |
| 408681 | AW953853 | Hs.281462 | ESTs, Weakly similar to I38022 hypotheti | 2.80 | 293 |
| 459208 | BE261314 | Hs.250469 | ESTs, Weakly similar to I38022 hypotheti | 2.80 | 4659 |
| 445133 | AW157646 | Hs.198689 | ESTs | 2.80 | 3654 |
| 455236 | AW875972 | | gb: CM3-PT0014-071299-051-b05 PT0014 Homo | 2.80 | 4503 |
| 426647 | AA243464 | Hs.294101 | pre-B-cell leukemia transcription factor | 2.80 | 2085 |
| 411954 | AA652523 | Hs.269496 | ESTs, Weakly similar to I38022 hypotheti | 2.80 | 591 |
| 426925 | NM_001196 | Hs.315689 | Homo sapiens cDNA: FLJ22373 fis, clone H | 2.80 | 2112 5326 |
| 425128 | BE561929 | Hs.154718 | tumor protein D52-like 2 | 2.80 | 1924 |
| 432642 | BE297635 | Hs.3069 | heat shock 70 kD protein 9B (mortalin-2) | 2.80 | 2688 |
| 416128 | AA173632 | | CDC14 (cell division cycle 14, S. cerevi | 2.80 | 974 |
| 427342 | AL110150 | Hs.176680 | Homo sapiens mRNA; cDNA DKFZp586D0724 (f | 2.80 | 2144 |
| 419544 | AI909154 | | gb: QV-BT200-010499-007 BT200 Homo sapien | 2.80 | 1329 |
| 450214 | BE439763 | Hs.227571 | regulator of G-protein signalling 4 | 2.80 | 4113 |
| 403848 | | | arylsulfatase E (chondrodysplasia puncta | 2.80 | |
| 448002 | Y15227 | Hs.20149 | deleted in lymphocytic leukemia, 1 | 2.80 | 3935 5705 |
| 431999 | AL133573 | Hs.272312 | Homo sapiens mRNA; cDNA DKFZp434J2235 (f | 2.80 | 2625 |
| 402261 | | | C19001033*: gi\|6754398\|ref\|NP_036071.1\|J | 2.80 | |
| 415660 | AI909007 | Hs.78563 | ubiquitin-conjugating enzyme E2G 1 (Homo | 2.80 | 943 |
| 428134 | AA421773 | Hs.161008 | ESTs | 2.80 | 2221 |
| 437147 | AL049964 | | hypothetical protein FLJ20366 | 2.80 | 3037 |
| 442562 | BE379584 | | dolichyl-diphosphooligosaccharide-protei | 2.80 | 3443 |
| 423441 | R68649 | Hs.278359 | absent in melanoma 1 like | 2.80 | 1745 |
| 436211 | AK001581 | Hs.334828 | hypothetical protein FLJ10719; KIAA1794 | 2.80 | 2967 5576 |
| 437341 | AA749062 | | ESTs, Weakly similar to I54374 gene NF2 | 2.80 | 3059 |
| 454453 | AW752781 | | hypothetical protein FLJ12614 similar to | 2.80 | 4485 |
| 434723 | W17044 | Hs.327337 | ESTs | 2.79 | 2862 |
| 442553 | H87867 | Hs.40065 | hypothetical protein MGC4825 | 2.79 | 3440 |
| 432728 | NM_006979 | Hs.278721 | HLA class II region expressed gene KE4 | 2.79 | 2694 5512 |
| 409132 | AJ224538 | Hs.50732 | protein kinase, AMP-activated, beta 2 no | 2.79 | 338 4813 |
| 453863 | X02544 | Hs.572 | orosomucoid 1 | 2.79 | 4438 5786 |
| 447604 | AW089933 | Hs.301342 | hypothetical protein MGC4342 | 2.79 | 3885 |
| 432195 | AJ243669 | Hs.8127 | KIAA0144 gene product | 2.79 | 2642 5503 |
| 448850 | AB018286 | Hs.247837 | neurexin 3 | 2.79 | 4013 5715 |
| 445800 | AA126419 | Hs.32944 | inositol polyphosphate-4-phosphatase, ty | 2.79 | 3699 |
| 449019 | AI949095 | Hs.67776 | ESTs, Weakly similar to T22341 hypotheti | 2.78 | 4028 |
| 452747 | BE153855 | Hs.61460 | Ig superfamily receptor LNIR | 2.78 | 4341 |
| 409190 | AU076536 | Hs.50984 | sarcoma amplified sequence | 2.78 | 349 |
| 446080 | AI221741 | Hs.117777 | ESTs | 2.78 | 3723 |
| 442476 | AF069475 | | gb: AF069475 Homo sapiens astrocytoma lib | 2.78 | 3433 |
| 414907 | X90725 | Hs.77597 | polo (Drosophia)-like kinase | 2.78 | 4933 891 |
| 451150 | AI888124 | Hs.285280 | Homo sapiens cDNA: FLJ22096 fis, clone H | 2.78 | 4197 |
| 438182 | AW342140 | Hs.182545 | ESTs, Weakly similar to ALU1_HUMAN ALU S | 2.78 | 3124 |
| 420164 | AW339037 | Hs.24908 | ESTs | 2.78 | 1390 |
| 422404 | AL133571 | Hs.336189 | Homo sapiens mRNA: cDNA DKFZp434F1135 (f | 2.77 | 1639 |
| 451958 | AW207328 | | ESTs | 2.77 | 4259 |
| 444895 | AI674383 | Hs.22891 | solute carrier family 7 (cationic amino | 2.76 | 3638 |
| 421260 | N46574 | Hs.43838 | ESTs | 2.76 | 1499 |
| 443507 | AI769289 | Hs.22383 | hypothetical protein FLJ11336 | 2.76 | 3525 |
| 446383 | T05816 | Hs.92511 | ESTs | 2.76 | 3748 |
| 424118 | BE269041 | Hs.140452 | cargo selection protein (mannose 6 phosp | 2.76 | 1805 |
| 407699 | AA825974 | Hs.32646 | hypothetical protein FLJ21901 | 2.76 | 182 |
| 422170 | AI791949 | Hs.112432 | anti-Mullerian hormone | 2.76 | 1613 |
| 400294 | N95796 | Hs.278695 | Homo sapiens prostein mRNA, complete cds | 2.76 | 7 |
| 441181 | AA416925 | | peptidylprolyl isomerase (cyclophilin)-I | 2.76 | 3337 |
| 415889 | R24563 | | VPS10 domain receptor protein | 2.75 | 957 |
| 400821 | | | Target Exon | 2.75 | |
| 416814 | AW192307 | Hs.80042 | dolichyl-P-Glc: Man9GlcNAc2-PP-dolichylgl | 2.75 | 1026 |
| 400857 | | | ENSP00000228038*: PUTATIVE SERINE/THREONI | 2.75 | |
| 411666 | AF106564 | Hs.71346 | neurofilament 3 (150 kD medium) | 2.75 | 566 |
| 444185 | AW298350 | Hs.113602 | ESTs | 2.75 | 3582 |
| 443385 | AI792839 | Hs.133113 | ESTs | 2.75 | 3521 |
| 445873 | AA250970 | Hs.251946 | poly(A)-binding protein, cytoplasmic 1-I | 2.75 | 3707 |
| 441102 | AA973905 | | intermediate filament protein syncoilin | 2.75 | 3333 |
| 411630 | U42349 | Hs.71119 | Putative prostate cancer tumor suppresso | 2.75 | 4866 565 |
| 456193 | H43437 | Hs.80305 | hypothetical protein MGC14258 | 2.75 | 4531 |
| 421342 | AA504749 | | gb: aa63f08.r1 NCI_CGAP_GCB1 Homo sapiens | 2.75 | 1510 |
| 419507 | AW170425 | Hs.87680 | ESTs | 2.75 | 1322 |
| 439602 | W79114 | Hs.58558 | ESTs | 2.75 | 3222 |
| 453775 | NM_002916 | Hs.35120 | replication factor C (activator 1) 4 (37 | 2.75 | 4431 5783 |
| 438054 | AA776626 | Hs.169309 | ESTs | 2.75 | 3115 |
| 423598 | BE247600 | Hs.155538 | ESTs | 2.75 | 1760 |
| 407771 | AL138272 | Hs.1600 | ESTs | 2.75 | 193 |
| 423492 | AF020761 | Hs.129683 | ubiquitin-conjugating enzyme E2D 1 (Homo | 2.75 | 1752 |
| 422336 | AI761322 | Hs.115285 | dihydrolipoamide S-acetyltransferase (E2 | 2.75 | 1633 |
| 409717 | AW452871 | Hs.56043 | CGI-115 protein | 2.75 | 400 |
| 447818 | W79940 | Hs.21906 | Homo sapiens clone 24670 mRNA sequence | 2.75 | 3909 |
| 414361 | AI086138 | Hs.204044 | ESTs | 2.75 | 816 |
| 424840 | D79987 | Hs.153479 | extra spindle poles, S. cerevisiae, Homo | 2.75 | 1890 5233 |
| 442711 | AF151073 | Hs.8645 | hypothetical protein | 2.75 | 3460 5625 |
| 436561 | BE560135 | Hs.5232 | HSPC125 protein | 2.75 | 2994 |
| 408576 | NM_003542 | Hs.46423 | H4 histone family, member G | 2.74 | 280 4800 |
| 443724 | AA446783 | Hs.288932 | hypothetical protein FLJ13194 | 2.74 | 3546 |
| 441057 | AL043897 | | ESTs | 2.74 | 3330 |
| 450983 | AA305384 | Hs.25740 | ERO1 (S. cerevisiae)-like | 2.73 | 4180 |
| 420230 | AL034344 | Hs.284186 | forkhead box C1 | 2.73 | 1398 5069 |
| 424873 | AB018294 | Hs.153610 | KIAA0751 gene product | 2.73 | 1893 5235 |
| 452960 | AK001335 | Hs.31137 | protein tyrosine phosphatase, receptor t | 2.73 | 4360 |
| 442861 | AA243837 | Hs.57787 | ESTs | 2.73 | 3475 |
| 416801 | X98834 | Hs.79971 | sal (Drosophila)-like 2 | 2.73 | 1024 |
| 423250 | BE061916 | Hs.125849 | chromosome 8 open reading frame 2 | 2.73 | 1732 |
| 416959 | D28459 | Hs.80612 | ubiquitin-conjugating enzyme E2A (RAD6 h | 2.73 | 1043 4973 |
| 413719 | BE439580 | Hs.75498 | small inducible cytokine subfamily A (Cy | 2.73 | 749 |
| 446100 | AW967109 | Hs.13804 | hypothetical protein dJ462O23.2 | 2.73 | 3724 |
| 442404 | AI733500 | Hs.124370 | ESTs | 2.73 | 3426 |
| 412988 | BE046680 | | gb: hn42h03.x1 NCI_CGAP_RDF2 Homo sapiens | 2.72 | |
| 421582 | AI910275 | | trefoil factor 1 (breast cancer, estroge | 2.72 | 1541 |
| 434288 | AW189075 | Hs.116265 | fibrillin3 | 2.72 | 2826 |
| 418461 | BE242781 | Hs.102971 | hypothetical protein FLJ14751 | 2.72 | 1203 |
| 454462 | AW754153 | Hs.155976 | cullin 4B | 2.72 | 4486 |
| 451089 | AA903705 | Hs.4190 | Homo sapiens cDNA: FLJ23269 fis, clone C | 2.72 | 4191 |
| 441436 | AW137772 | Hs.185980 | ESTs | 2.71 | 3353 |
| 430227 | AI924441 | Hs.236218 | TAT-INTERACTIVE PROTEIN, 72-KD | 2.71 | 2456 |
| 417089 | H52280 | Hs.18612 | Homo sapiens cDNA: FLJ21909 fis, clone H | 2.71 | 1062 |
| 403671 | | | C4001270*: gi\|7509005\|pir\|\|T26190 hypothe | 2.71 | 47 |
| 436895 | AF037335 | Hs.5338 | carbonic anhydrase XII | 2.71 | 3019 5582 |
| 435474 | W92102 | Hs.117269 | ESTs | 2.71 | 2918 |
| 408405 | AK001332 | Hs.44672 | hypothetical protein FLJ10470 | 2.71 | 264 4796 |
| 420319 | AW406289 | Hs.96593 | hypothetical protein | 2.70 | 1410 |
| 419329 | AY007220 | Hs.288998 | S100-type calcium binding protein A14 | 2.70 | 1301 5043 |
| 402280 | | | C19002023: gi\|12741355ref\|XP_012768.1\|z | 2.70 | |
| 415208 | F01020 | Hs.172004 | titin | 2.70 | 916 |
| 400240 | | | Eos Control | 2.70 | |
| 405976 | | | Target Exon | 2.70 | |
| 400074 | | | Eos Control | 2.70 | |
| 432093 | H28383 | | gb: yl52c03.r1 Soares breast 3NbHBst Homo | 2.70 | 2630 |
| 435579 | AI332373 | Hs.156924 | ESTs | 2.70 | 2930 |
| 443323 | BE560621 | Hs.9222 | estrogen receptor binding site associate | 2.70 | 3518 |
| 412505 | AA974491 | Hs.21734 | ESTs | 2.70 | 638 |
| 451311 | D61040 | | gb: HUM149E10B Clontech human fetal brain | 2.70 | 4208 |
| 437025 | AW296618 | Hs.120637 | ESTs | 2.70 | 3028 |
| 414429 | R51494 | Hs.71818 | ESTs | 2.70 | 827 |
| 432188 | AI362952 | Hs.2928 | solute carrier family 7 (cationic amino | 2.70 | 2641 |
| 457873 | AA736920 | Hs.288518 | ESTs | 2.70 | 4603 |
| 455290 | U75810 | | gb: HSU75810 Human Homo sapiens cDNA clon | 2.70 | 4505 |
| 447678 | BE385257 | Hs.63908 | Homo sapiens dopamine receptor interacti | 2.70 | 3890 |
| 429782 | NM_005754 | Hs.220689 | Ras-GTPase-activating protein SH3-domain | 2.70 | 2416 5425 |
| 406203 | | | Target Exon | 2.70 | |
| 419030 | T79957 | Hs.188466 | ESTs | 2.70 | 1268 |
| 444911 | U06117 | Hs.250 | xanthene dehydrogenase | 2.70 | 3639 5647 |
| 456759 | BE259150 | Hs.127792 | delta (Drosophila)-like 3 | 2.70 | 4560 |
| 445564 | AB028957 | Hs.12896 | KIAA1034 protein | 2.70 | 3684 5656 |
| 428816 | AA004986 | Hs.193852 | ATP-binding cassette, sub-family C (CFTR | 2.70 | 2303 |
| 416800 | H89652 | | gb: yu81f05.r1 Soares fetal liver spleen | 2.70 | 1023 |
| 418104 | T05726 | Hs.177130 | ESTs | 2.70 | 1159 |
| 409435 | AI810721 | Hs.95424 | ESTs | 2.70 | 370 |
| 412926 | AI879076 | Hs.75061 | macrophage myristoylated alanine-rich C | 2.70 | 682 |
| 436876 | AI124756 | Hs.5337 | isocitrate dehydrogenase 2 (NADP), mitoc | 2.70 | 3016 |
| 447400 | AK000322 | Hs.18457 | hypothetical protein FLJ20315 | 2.69 | 3857 5686 |
| 452436 | BE077546 | Hs.31447 | ESTs, Moderately similar to A46010 X-lin | 2.69 | 4308 |
| 409775 | AW499605 | | gb: UI-HF-BP0p-ain-c-05-0-UI.r1 NIH_MGC_5 | 2.69 | 404 |
| 450222 | U75308 | Hs.24644 | TATA box binding protein (TBP)-associate | 2.69 | 4115 5726 |
| 414416 | AW409985 | Hs.76084 | hypothetical protein MGC2721 | 2.69 | 824 |
| 452567 | D87120 | Hs.29882 | predicted osteoblast protein | 2.69 | 4326 5759 |
| 421485 | AA243499 | Hs.104800 | hypothetical protein FLJ10134 | 2.69 | 1524 |
| 402609 | | | KIAA1209 protein | 2.69 | |
| 419741 | NM_007019 | Hs.93002 | ubiquitin carrier protein E2-C | 2.68 | 1355 5056 |
| 417715 | AW969587 | Hs.86366 | ESTs | 2.68 | 1115 |
| 411669 | BE612676 | Hs.303116 | stromal cell-derived factor 2-like 1 | 2.68 | 567 |
| 439424 | AI478667 | Hs.118183 | hypothetical protein FLJ22833 | 2.68 | 3207 |
| 409590 | AW997069 | Hs.99010 | hypothetical protein FLJ22263 similar to | 2.68 | 386 |
| 402927 | | | ENSP00000243914*: DJ579F20.2 (similar to | 2.68 | |
| 409529 | AB007884 | Hs.54697 | Cdc42 guanine exchange factor (GEF) 9 | 2.68 | 381 4826 |
| 450816 | BE271927 | Hs.87385 | ESTs | 2.68 | 4168 |
| 416221 | BE513171 | Hs.79086 | mitochondrial ribosomal protein L3 | 2.67 | 982 |
| 427505 | AA361562 | Hs.178761 | 26S proteasome-associated pad1 homolog | 2.67 | 2158 |
| 424629 | M90656 | Hs.151393 | glutamate-cysteine ligase, catalytic sub | 2.67 | 1865 5221 |
| 428844 | AW972635 | Hs.301904 | hypothetical protein FLJ12671 | 2.67 | 2311 |
| 453464 | AI884911 | Hs.32989 | receptor (calcitonin) activity modifying | 2.67 | 4409 |
| 422424 | AI186431 | Hs.296638 | prostate differentiation factor | 2.67 | 1645 |
| 410703 | AW798089 | | gb: CM0-UM0045-030300-262-c05 UM0045 Homo | 2.67 | 509 |
| 418385 | AW590613 | Hs.301040 | Homo sapiens, clone IMAGE: 3357127, mRNA, | 2.67 | 1194 |
| 430301 | AI902657 | Hs.188662 | KIAA1702 protein | 2.67 | 2466 |
| 403324 | | | C2000428*: gi\|7705383\|ref\|NP_057536.1\|GC | 2.67 | |
| 430532 | D61216 | Hs.18672 | ESTs | 2.67 | 2494 |
| 426153 | AF057169 | Hs.182771 | vitelliform macular dystrophy (Best dise | 2.67 | 2032 5293 |
| 435602 | AF217515 | Hs.283532 | uncharacterized bone marrow protein BM03 | 2.67 | 2931 5567 |
| 450669 | AL138077 | Hs.16157 | hypothetical protein FLJ12707 | 2.67 | 4146 |
| 450587 | AI828854 | Hs.258538 | striatin, calmodulin-binding protein | 2.67 | 4142 |
| 452256 | AK000933 | Hs.28661 | Homo sapiens cDNA FLJ10071 fis, clone HE | 2.67 | 4289 |
| 446525 | AW967069 | Hs.211556 | hypothetical protein MGC5487 | 2.67 | 3758 |
| 450273 | AW296454 | Hs.24743 | hypothetical protein FLJ20171 | 2.66 | 4121 |
| 409361 | NM_005982 | Hs.54416 | sine oculis homeobox (Drosophila) homolo | 2.66 | 364 4823 |
| 452826 | BE245286 | Hs.301636 | peroxisomal biogenesis factor 6 | 2.66 | 4349 |
| 429500 | X78565 | Hs.289114 | hexabrachion (tenascin C, cytotactin) | 2.66 | 2380 5410 |
| 444476 | AF020038 | Hs.11223 | isocitrate dehydrogenase 1 (NADP), solub | 2.66 | 3601 5639 |
| 400528 | | | NM_020975*: Homo sapiens ret proto-oncoge | 2.66 | 18 4690 |
| 423445 | NM_014324 | Hs.128749 | alpha-methylacyl-CoA racemase | 2.66 | 1746 5179 |
| 419704 | AA429104 | Hs.45057 | ESTs | 2.66 | 1350 |
| 442923 | AW248322 | Hs.95835 | ESTs, Weakly similar to unnamed protein | 2.66 | 3482 |
| 445786 | AW629819 | Hs.144502 | hypothetical protein FLJ22055 | 2.66 | 3697 |
| 445707 | AI248720 | Hs.114390 | ESTs | 2.66 | 3695 |
| 410575 | BE207480 | Hs.6994 | Homo sapiens cDNA: FLJ22044 fis, clone H | 2.65 | 494 |
| 435327 | BE301871 | Hs.4867 | mannosyl (alpha-1,3-)-glycoprotein beta- | 2.65 | 2908 |
| 428788 | AF082283 | Hs.193516 | B-cell CLL/lymphoma 10 | 2.65 | 2299 5378 |
| 447776 | AI525625 | Hs.130181 | UDP-N-acetyl-alpha-D-galactosamine: polyp | 2.65 | 3905 |
| 442604 | BE263710 | | gb: 601192150F1 NIH_MGC_7 Homo sapiens cD | 2.65 | 3451 |
| 445572 | AI243445 | Hs.189654 | ESTs | 2.65 | 3687 |
| 436581 | AA725726 | Hs.180213 | ESTs | 2.65 | 2995 |
| 450671 | AI356967 | Hs.43086 | ESTs, Weakly similar to A46010 X-linked | 2.65 | 4147 |
| 424238 | AA337401 | Hs.137635 | ESTs | 2.65 | 1817 |
| 404478 | | | NM_015435: Homo sapiens double ring-finge | 2.65 | 4722 55 |
| 402265 | | | Target Exon | 2.65 | |
| 414872 | U82010 | Hs.77513 | COX10 (yeast) homolog, cytochrome c oxid | 2.65 | 4932 886 |
| 450927 | AI807804 | Hs.134342 | TASP for testis-specific adriamycin sens | 2.65 | 4175 |
| 447673 | AI823987 | Hs.182285 | ESTs | 2.65 | 3889 |
| 424686 | AA345504 | | gb: EST51529 Gall bladder II Homo sapiens | 2.65 | 1873 |
| 420210 | AI557257 | Hs.44811 | ESTs | 2.65 | 1395 |
| 452451 | AA311250 | Hs.5621 | ESTs, Weakly similar to A46010 X-linked | 2.65 | 4309 |
| 449570 | AA001793 | | gb: zh86c06.r1 Soares_fetal_liver_spleen_{—} | 2.65 | 4068 |
| 410252 | AW821182 | Hs.61418 | microfibrillar-associated protein 1 | 2.65 | 460 |
| 428186 | AW504300 | Hs.295605 | mannosidase, alpha, class 2A, member 2 | 2.65 | 2228 |
| 453878 | AW964440 | Hs.19025 | DC32 | 2.65 | 4442 |
| 435274 | AA887547 | Hs.150905 | ESTs | 2.65 | 2905 |
| 430001 | AI580056 | Hs.98992 | ESTs | 2.65 | 2436 |
| 401796 | | | NM_021213*: Homo sapiens phosphatidylchol | 2.65 | 29 4699 |
| 401783 | | | NM_003771*: Homo sapiens keratin, hair, a | 2.65 | 28 4698 |
| 419362 | N64116 | Hs.24624 | hypothetical protein FLJ21945 | 2.65 | 1306 |
| 455737 | BE072246 | | gb: QV4-BT0536-271299-059-b12 BT0536 Homo | 2.65 | 4520 |
| 408161 | AW952912 | Hs.300383 | hypothetical protein MGC3032 | 2.65 | 240 |
| 436488 | BE620909 | Hs.261023 | hypothetical protein FLJ20958 | 2.65 | 2989 |
| 424736 | AF230877 | Hs.152701 | microtubule-interacting protein that ass | 2.65 | 1880 5230 |
| 444656 | AI277924 | Hs.145199 | ESTs | 2.65 | 3617 |
| 422516 | BE258862 | Hs.117950 | multifunctional polypeptide similar to S | 2.65 | 1652 |
| 431070 | AW408164 | Hs.249184 | transcription factor 19 (SC1) | 2.65 | 2529 |
| 418166 | AI754416 | | Cdc42 effector protein 3 | 2.65 | 1166 |
| 402553 | | | C1001756*: gi\|2143875\|pir\|\|I73636 neurona | 2.65 | 35 |
| 447587 | AW292139 | Hs.115789 | ESTs | 2.64 | 3884 |
| 424339 | BE257148 | | endoglycan | 2.64 | 1831 |
| 424723 | BE409813 | Hs.152337 | protein arginine N-methyltransferase 3(h | 2.64 | 1878 |
| 431842 | NM_005764 | Hs.271473 | epithelial protein up-regulated in carci | 2.64 | 2604 5492 |
| 445101 | T75202 | Hs.12314 | Homo sapiens mRNA; cDNA DKFZp586C1019 (f | 2.64 | 3652 |
| 419234 | AI565714 | Hs.101660 | ESTs | 2.64 | 1291 |
| 429617 | X89984 | Hs.211563 | B-cell CLL/lymphoma 7A | 2.64 | 2397 5417 |
| 458513 | AI138322 | Hs.154894 | ESTs | 2.63 | 4627 |
| 422872 | BE326786 | Hs.187646 | ESTs | 2.63 | 1688 |
| 433980 | AA137152 | Hs.286049 | phosphoserine aminotransferase | 2.63 | 2803 |
| 458692 | BE549905 | Hs.231754 | ESTs | 2.63 | 4633 |
| 435607 | W73428 | Hs.8750 | uncharacterized bone marrow protein BM04 | 2.63 | 2932 |
| 412141 | AI183838 | Hs.48938 | hypothetical protein FLJ21802 | 2.63 | 614 |
| 448857 | BE264467 | Hs.117929 | ESTs | 2.63 | 4015 |
| 441616 | BE569122 | | RNA-binding protein (autoantigenic) | 2.63 | 3360 |
| 438472 | AW974907 | Hs.86228 | TRIAD3 protein | 2.62 | 3142 |
| 415214 | AI445236 | Hs.125124 | EphB2 | 2.62 | 917 |
| 421810 | AK001718 | Hs.108530 | hypothetical protein FLJ10856 | 2.62 | 1566 5123 |
| 434811 | AW971205 | Hs.114280 | ESTs | 2.62 | 2869 |
| 423081 | AF262992 | Hs.123159 | sperm associated antigen 4 | 2.62 | 1717 5167 |
| 418655 | AA226354 | Hs.111240 | ESTs | 2.62 | 1220 |
| 412760 | AW379030 | Hs.41324 | ESTs | 2.62 | 668 |
| 417848 | AA206581 | Hs.116586 | ESTs, Weakly similar to JC5314 CDC28/cdc | 2.62 | 1129 |
| 405558 | | | Target Exon | 2.61 | |
| 423450 | AJ290445 | Hs.128759 | KIAA0524 protein | 2.61 | 1747 5180 |
| 420071 | AB028985 | Hs.94806 | ATP-binding cassette, sub-family A (ABC1 | 2.61 | 1380 5063 |
| 430654 | AW970081 | Hs.325603 | ESTs | 2.61 | 2503 |
| 412756 | N27422 | | ESTs, Moderately similar to Z195_HUMAN Z | 2.61 | 667 |
| 429045 | AA443751 | Hs.191819 | ESTs, Weakly similar to I38022 hypotheti | 2.60 | 2328 |
| 453392 | U23752 | Hs.32964 | SRY (sex determining region Y)-box 11 | 2.60 | 4403 5776 |
| 404576 | | | Target Exon | 2.60 | |
| 426028 | NM_001110 | Hs.172028 | a disintegrin and metalloproteinase doma | 2.60 | 2020 5287 |
| 451862 | H09260 | Hs.32333 | ESTs | 2.60 | 4254 |
| 416505 | H66470 | Hs.16004 | ESTs | 2.60 | 1000 |
| 417807 | R17806 | Hs.269452 | gb: yg09b06.r1 Soares infant brain 1NIB H | 2.60 | 1125 |
| 418105 | AW937488 | Hs.246381 | ESTs, Weakly similar to FV1 MOUSE FRIEND | 2.60 | 1160 |
| 401924 | | | ENSP00000246632*: CDNA FLJ20261 fis, clon | 2.60 | |
| 436027 | AI864053 | Hs.39972 | GM2 ganglioside activator protein (GM2A) | 2.60 | 2956 |
| 451446 | AI826288 | Hs.171637 | hypothetical protein MGC2628 | 2.60 | 4223 |
| 406389 | | | C5001408*: gi\|12621134\|ref\|NP_075244.1\|M | 2.60 | |
| 433906 | AI167816 | Hs.43355 | ESTs | 2.60 | 2796 |
| 404156 | | | C6002456: gi\|6755268\|ref\|NP_036008.1\|RAS | 2.60 | |
| 418771 | AA807881 | Hs.172792 | ESTs | 2.60 | 1239 |
| 420270 | AA257990 | Hs.137427 | ESTs | 2.60 | 1404 |
| 445371 | AI221645 | Hs.147800 | ESTs | 2.60 | 3673 |
| 439453 | BE264974 | Hs.6566 | thyroid hormone receptor interactor 13 | 2.60 | 3208 |
| 415857 | AA866115 | Hs.127797 | Homo sapiens cDNA FLJ11381 fis, clone HE | 2.60 | 956 |
| 445326 | AI220072 | | ESTs | 2.60 | 3669 |
| 416921 | N20177 | Hs.205024 | ESTs, Highly similar to B34087 hypotheti | 2.60 | 1038 |
| 432723 | D29677 | Hs.3085 | KIAA0054 gene product: Helicase | 2.60 | 2693 |
| 408031 | AA081395 | Hs.42173 | Homo sapiens cDNA FLJ10366 fis, clone NT | 2.60 | 225 |
| 431567 | N51357 | Hs.260855 | Homo sapiens cDNA: FLJ21410 fis, clone C | 2.60 | 2569 |
| 417183 | R52089 | Hs.172717 | ESTs | 2.60 | 1069 |
| 448663 | BE614599 | | hypothetical protein MGC14797 | 2.60 | 3993 |
| 430393 | BE185030 | Hs.241305 | estrogen-responsive B box protein | 2.60 | 2480 |
| 407325 | AA291180 | Hs.328476 | ESTs, Weakly similar to alternatively sp | 2.60 | 153 |
| 430408 | AA478540 | Hs.108336 | ESTs, Weakly similar to ALUE_HUMAN !!!! | 2.59 | 2483 |
| 418838 | AW385224 | Hs.35198 | ectonucleotide pyrophosphatase/phosphodi | 2.59 | 1248 |
| 409937 | AI804584 | Hs.57672 | leucine rich repeat (in FLII) interactin | 2.59 | 421 |
| 446937 | AA977190 | | ESTs | 2.59 | 3803 |
| 439343 | AF086161 | Hs.114611 | hypothetical protein FLJ11808 | 2.59 | 3201 |
| 434449 | AW953484 | Hs.3849 | hypothetical protein FLJ22041 similar to | 2.59 | 2841 |
| 456161 | BE264645 | Hs.282093 | hypothetical protein FLJ21918 | 2.59 | 4530 |
| 429294 | AA095971 | Hs.198793 | Homo sapiens cDNA: FLJ22463 fis, clone H | 2.59 | 2351 |
| 423357 | AI285124 | | ESTs | 2.59 | 1738 |
| 410359 | R38624 | Hs.106313 | ESTs | 2.59 | 468 |
| 426357 | AW753757 | Hs.12396 | gb: RC3-CT0283-271099-021-a08 CT0283 Homo | 2.59 | 2058 |
| 450378 | AW249181 | Hs.198899 | ESTs, Weakly similar to T19873 hypotheti | 2.58 | 4135 |
| 409710 | C04706 | Hs.42733 | CHMP1.5 protein | 2.58 | 398 |
| 452526 | W38537 | Hs.280740 | hypothetical protein MGC3040 | 2.58 | 4322 |
| 414774 | X02419 | Hs.77274 | plasminogen activator, urokinase | 2.58 | 4928 877 |
| 432435 | BE218886 | Hs.282070 | ESTs | 2.58 | 2667 |
| 448069 | U76248 | Hs.20191 | seven in absentia (Drosophila) homolog 2 | 2.58 | 3939 5707 |
| 423279 | AW959861 | Hs.290943 | ESTs | 2.58 | 1733 |
| 428708 | NM_014897 | Hs.190386 | KIAA0924 protein | 2.58 | 2284 5371 |
| 432026 | AA524545 | Hs.224630 | ESTs | 2.57 | 2627 |
| 447333 | BE090580 | Hs.70704 | hypothetical protein dJ616B8.3 | 2.57 | 3843 |
| 426272 | AW450671 | Hs.189284 | ESTs | 2.57 | 2046 |
| 447380 | AA743756 | Hs.116695 | ESTs, Weakly similar to I38022 hypotheti | 2.57 | 3852 |
| 407881 | AW072003 | Hs.40968 | heparan sulfate (glucosamine) 3-O-sulfot | 2.57 | 211 |
| 456906 | AF117646 | Hs.156637 | Cau-Br-M (murine) ectropic retroviral tr | 2.57 | 4567 5804 |
| 416065 | BE267931 | Hs.78996 | proliferating cell nuclear antigen | 2.57 | 969 |
| 407590 | AI831258 | | ESTs | 2.57 | 171 |
| 429170 | NM_001394 | Hs.2359 | dual specificity phosphatase 4 | 2.57 | 2336 5392 |
| 408246 | N55669 | Hs.333823 | mitochondrial ribosomal protein L13 | 2.57 | 248 |
| 440660 | AI300101 | Hs.131886 | Homo sapiens cDNA: FLJ22113 fis, clone H | 2.56 | 3310 |
| 422630 | AA313606 | Hs.13809 | hypothetical protein FLJ10648 | 2.56 | 1664 |
| 410913 | AL050367 | Hs.66762 | Homo sapiens mRNA; cDNA DKFZp564A026 (fr | 2.56 | 4859 520 |
| 456940 | H46986 | Hs.31861 | ESTs | 2.56 | 4569 |
| 429588 | AI080271 | | ESTs | 2.56 | 2391 |
| 427227 | AF103803 | Hs.283690 | hypothetical protein | 2.56 | 2133 5334 |
| 447347 | AA570056 | Hs.122730 | ESTs, Moderately similar to KIAA1215 pro | 2.56 | 3847 |
| 411423 | AW845987 | Hs.68864 | ESTs, Weakly similar to phosphatidylseri | 2.56 | 555 |
| 437175 | AW968078 | Hs.87773 | protein kinase, cAMP-dependent, catalyti | 2.56 | 3041 |
| 445652 | AL117473 | Hs.13036 | DKFZP727A071 protein | 2.56 | 3690 5657 |
| 422421 | AA325138 | Hs.235873 | hypothetical protein FLJ22672 | 2.56 | 1644 |
| 440115 | R41808 | Hs.144924 | ESTs, Weakly similar to B Chain B, Solut | 2.55 | 3265 |
| 421508 | NM_004833 | Hs.105115 | absent in melanoma 2 | 2.55 | 1529 5111 |
| 447532 | AK000614 | Hs.18791 | hypothetical protein FLJ20607 | 2.55 | 3875 5690 |
| 404580 | | | trichorhinophalangeal syndrome I gene (T | 2.55 | |
| 444454 | BE018316 | Hs.11183 | sorting nexin 2 | 2.55 | 3599 |
| 421557 | AA292875 | Hs.97333 | ESTs | 2.55 | 1538 |
| 456370 | AA234938 | Hs.87384 | ESTs | 2.55 | 4538 |
| 444161 | N52543 | Hs.142940 | ESTs | 2.55 | 3578 |
| 419647 | AA348947 | Hs.91816 | hypothetical protein | 2.55 | 1343 |
| 437231 | BE303000 | Hs.288929 | hypothetical protein FLJ13258 similar to | 2.55 | 3047 |
| 456210 | N49729 | Hs.129819 | ESTs | 2.55 | 4532 |
| 435410 | AL135067 | Hs.117182 | ESTs | 2.55 | 2913 |
| 411136 | AW845266 | | gb: IL2-CT0031-160999-003-B08 CT0031 Homo | 2.55 | 536 |
| 444461 | R53734 | Hs.25978 | ESTs, Weakly similar to 2109260A B cell | 2.55 | 3600 |
| 446035 | NM_006558 | Hs.13565 | Sam68-like phosphotyrosine protein, T-ST | 2.55 | 3720 5663 |
| 426901 | AA827922 | | ESTs | 2.55 | 2109 |
| 437919 | AA772006 | Hs.121630 | ESTs | 2.55 | 3106 |
| 428264 | AA424839 | Hs.98484 | ESTs, Weakly similar to ALU1_HUMAN ALU S | 2.55 | 2234 |
| 413374 | NM_001034 | Hs.75319 | ribonucleotide reductase M2 polypeptide | 2.55 | 4899 713 |
| 431917 | D16181 | Hs.2868 | peripheral myelin protein 2 | 2.55 | 2616 5494 |
| 412115 | AK001763 | Hs.73239 | hypothetical protein FLJ10901 | 2.55 | 4873 607 |
| 439708 | AI761369 | Hs.59584 | hypothetical protein FLJ21144 | 2.55 | 3231 |
| 428782 | X12830 | Hs.193400 | interleukin 6 receptor | 2.55 | 2298 5377 |
| 444091 | AV647924 | Hs.282376 | ESTs | 2.55 | 3574 |
| 434490 | AF143870 | Hs.15246 | ESTs | 2.55 | 2844 |
| 427677 | NM_007045 | Hs.180296 | FGFR1 oncogene partner | 2.55 | 2179 5343 |
| 422296 | AA360231 | Hs.114416 | Homo sapiens, Similar to transducin (bet | 2.55 | 1629 |
| 407788 | BE514982 | Hs.38991 | S100 calcium-binding protein A2 | 2.54 | 195 |
| 430375 | AW371048 | Hs.93758 | H4 histone family, member H | 2.54 | 2477 |
| 456249 | AI206144 | Hs.82508 | HRIHFB2206 protein | 2.54 | 4533 |
| 458981 | AW968318 | Hs.285996 | hypothetical protein FLJ23375 | 2.54 | 4648 |
| 445075 | AI651827 | | ESTs | 2.54 | 3649 |
| 442795 | AW027935 | Hs.251351 | ESTs, Moderately similar to ALU8_HUMAN A | 2.54 | 3471 |
| 451945 | BE504055 | Hs.211420 | ESTs | 2.54 | 4258 |
| 405418 | | | Target Exon | 2.54 | |
| 432878 | BE386490 | Hs.279663 | Pirin | 2.54 | 2707 |
| 434011 | AW953437 | Hs.5486 | clone FLB6214 | 2.53 | 2805 |
| 432942 | AF083955 | Hs.279852 | G protein-coupled receptor | 2.53 | 2714 5519 |
| 403291 | | | Target Exon | 2.53 | |
| 425139 | AW630488 | Hs.25338 | protease, serine, 23 | 2.53 | 1925 |
| 448209 | AW160489 | Hs.20709 | tetraspan 5 | 2.53 | 3951 |
| 434629 | AA789081 | Hs.4029 | glioma-amplified sequence-41 | 2.53 | 2854 |
| 447973 | AB011169 | Hs.20141 | similar to S. cerevisiae SSM4 | 2.53 | 3929 5704 |
| 454294 | AB000734 | Hs.50640 | JAK binding protein | 2.52 | 4476 5795 |
| 446982 | AW500221 | Hs.43616 | gb: UI-HF-BN0-akd-c-03-0-UI.r1 NIH_MGC_50 | 2.52 | 3807 |
| 419735 | AW750056 | Hs.169577 | Homo sapiens cDNA FLJ14743 fis, clone NT | 2.52 | 1354 |
| 431657 | AI345227 | Hs.105448 | ESTs, Weakly similar to B34087 hypotheti | 2.52 | 2580 |
| 447898 | AW969638 | Hs.112318 | 6.2 kd protein | 2.52 | 3921 |
| 457370 | AW970998 | | gb: EST383083 MAGE resequences, MAGK Homo | 2.52 | 4589 |
| 442276 | AI253193 | Hs.129185 | ESTs, Weakly similar to ALU1_HUMAN ALU S | 2.52 | 3410 |
| 439465 | AF086285 | Hs.336620 | Homo sapiens, Similar to RIKEN cDNA 4930 | 2.52 | 3209 |
| 450074 | AI367213 | Hs.14070 | hypothetical protein FLJ14166 | 2.52 | 4103 |
| 424441 | X14850 | Hs.147097 | H2A histone family, member X | 2.52 | 1846 5212 |
| 427295 | AW291212 | Hs.293943 | hypothetical protein MGC11266 | 2.52 | 2139 |
| 424006 | AF054815 | Hs.137548 | CD84 antigen (leukocyte antigen) | 2.52 | 1791 5194 |
| 413326 | H88621 | Hs.19762 | ESTs, Weakly similar to KIAA1140 protein | 2.52 | 711 |
| 443790 | NM_003500 | Hs.9795 | acyl-Coenzyme A oxidase 2, branched chai | 2.52 | 3552 5631 |
| 400995 | | | C11000295*: gi\|12737279\|ref\|XP_012163.1\| | 2.52 | |
| 419767 | W73306 | Hs.306668 | Homo sapiens cDNA FLJ4089 fis, clone MA | 2.51 | 1361 |
| 405357 | | | NM_003371*: Homo sapiens vav 2 oncogene ( | 2.51 | 4734 68 |
| 424720 | M89907 | Hs.152292 | SWI/SNF related, matrix associated, acti | 2.51 | 1877 5228 |
| 408839 | AW277084 | | gb: xp61h09.x1 NCI_CGAP_Ov39 Homo sapiens | 2.51 | 311 |
| 414591 | AI888490 | Hs.55902 | ESTs, Weakly similar to ALU8_HUMAN ALU S | 2.51 | 850 |
| 403055 | | | C2002219*: gi\|12737280\|ref\|XP_006682.2\|k | 2.51 | |
| 437810 | BE246399 | | hypothetical protein | 2.51 | 3093 |
| 413599 | AJ006239 | Hs.75438 | quinoid dihydropteridine reductase | 2.51 | 4904 740 |
| 451259 | NM_006052 | Hs.26146 | Down syndrome critical region gene 3 | 2.51 | 4205 5740 |
| 410817 | AI262789 | Hs.93659 | protein disulfide isomerase related prot | 2.51 | 515 |
| 439943 | AW083789 | Hs.124620 | ESTs | 2.51 | 3247 |
| 409889 | AW630041 | Hs.56937 | suppression of tumorigenicity 14 (colon | 2.51 | 413 |
| 430168 | AW968343 | Hs.145582 | DKFZP434l1735 protein | 2.51 | 2449 |
| 428144 | BE269243 | Hs.182625 | VAMP (vesicle-associated membrane protei | 2.50 | 2222 |
| 402102 | | | Target Exon | 2.50 | |
| 401759 | | | Target Exon | 2.50 | |
| 453899 | AW134536 | Hs.243994 | ESTs | 2.50 | 4447 |
| 405510 | | | ENSP00000233779*: Hypothetical 68.0 kDa p | 2.50 | |
| 442186 | AA984083 | Hs.269746 | ESTs, Weakly similar to T03306 PSD-95/SA | 2.50 | 3405 |
| 423748 | AI149048 | Hs.30211 | hypothetical protein FLJ22313 | 2.50 | 1772 |
| 434378 | AA631739 | Hs.335440 | EST | 2.50 | 2836 |
| 420390 | AA330047 | Hs.191187 | ESTs | 2.50 | 1418 |
| 400272 | | | Eos Control | 2.50 | |
| 427161 | AI024595 | Hs.97508 | a disintegrin and metalloproteinase doma | 2.50 | 2128 |
| 446251 | AW867156 | Hs.282589 | ESTs, Weakly similar to I38022 hypotheti | 2.50 | 3739 |
| 413472 | BE242870 | Hs.75379 | solute carrier family 1 (glial high affi | 2.50 | 724 |
| 410386 | W26187 | Hs.3327 | Homo sapiens cDNA: FLJ22219 fis, clone H | 2.50 | 471 |
| 447698 | AI420156 | Hs.326733 | ESTs | 2.50 | 3891 |
| 456946 | T29678 | Hs.166068 | villin 1 | 2.50 | 4570 |
| 431328 | AA502999 | Hs.291591 | ESTs | 2.50 | 2548 |
| 456583 | AF179897 | Hs.104105 | Meis (mouse) homolog 2 | 2.50 | 4551 5800 |
| 433636 | AA603041 | Hs.296370 | ESTs | 2.50 | 2776 |
| 420325 | AA676544 | Hs.171545 | HIV-1 Rev binding protein | 2.50 | 1413 |
| 422637 | AA399024 | Hs.118836 | myoglobin | 2.50 | 1666 |
| 446586 | N58790 | Hs.268820 | ESTs | 2.50 | 3767 |
| 420520 | AK001978 | Hs.98510 | similar to rab11-binding protein | 2.50 | 1426 5079 |
| 438280 | AW015534 | Hs.217493 | annexin A2 | 2.50 | 3129 |
| 448822 | BE149845 | Hs.289038 | hypothetical protein MGC4126 | 2.50 | 4010 |
| 456497 | AW967956 | Hs.123648 | ESTs, Weakly similar to AF108460 1 ubinu | 2.50 | 4546 |
| 400298 | AA032279 | Hs.61635 | six transmembrane epithelial antigen of | 2.50 | 10 |
| 450277 | AI690071 | Hs.283552 | ESTs, Weakly similar to unnamed protein | 2.50 | 4122 |
| 431719 | AW191608 | Hs.77719 | ESTs, Moderately similar to I38022 hypot | 2.50 | 2589 |
| 409706 | BE158773 | Hs.213207 | ESTs | 2.50 | 397 |
| 420807 | AA280627 | Hs.57846 | ESTs | 2.50 | 1457 |
| 451722 | H86374 | Hs.40861 | ESTs | 2.50 | 4243 |
| 450341 | N90956 | Hs.17230 | hypothetical protein FLJ22087 | 2.50 | 4131 |
| 438552 | AJ245820 | Hs.6314 | type I transmembrane receptor (seizure-r | 2.50 | 3148 5596 |
| 430289 | AK001952 | Hs.238039 | hypothetical protein FLJ11090 | 2.50 | 2461 5440 |
| 416224 | NM_002902 | Hs.79088 | reticulocalbin 2, EF-hand calcium bindin | 2.50 | 4957 983 |
| 418372 | AA311833 | Hs.84318 | replication protein A1 (70 kD) | 2.49 | 1191 |
| 442229 | AI885776 | Hs.8164 | Mulibrey nanism | 2.49 | 3406 |
| 409175 | Y15057 | Hs.50905 | serine/threonine kinase 9 | 2.49 | 344 4815 |
| 420676 | AI434780 | Hs.4248 | vav 2 oncogene | 2.49 | 1443 |
| 433078 | AW015188 | Hs.121575 | Homo sapiens cDNA FLJ12231 fis, clone MA | 2.49 | 2733 |
| 432788 | AA521091 | Hs.178499 | Homo sapiens cDNA: FLJ23117 fis, clone L | 2.49 | 2699 |
| 425811 | AL039104 | Hs.159557 | karyopherin alpha 2 (RAG cohort 1, impor | 2.49 | 1999 |
| 448256 | BE614149 | Hs.20814 | CGI-27 protein | 2.49 | 3952 |
| 402842 | | | ENSP00000241325*: DJ947L8.1.3 (novel CUB | 2.48 | |
| 422799 | AI933199 | Hs.120911 | neurexophilin 4 | 2.48 | 1682 |
| 419517 | AF052107 | Hs.90797 | Homo sapiens clone 23620 mRNA sequence | 2.48 | 1324 |
| 451253 | H48299 | Hs.26126 | claudin 10 | 2.48 | 4204 |
| 453155 | AF052126 | Hs.552 | steroid-5-alpha-reductase, alpha polypep | 2.48 | 4379 5770 |
| 429282 | N27596 | Hs.21342 | ESTs | 2.48 | 2348 |
| 440334 | BE276112 | Hs.7165 | zinc finger protein 259 | 2.48 | 3283 |
| 437852 | BE001836 | Hs.256897 | putative GPCR | 2.47 | 3099 |
| 433339 | AF019226 | Hs.8036 | glioblastoma overexpressed | 2.47 | 2756 |
| 425145 | BE242802 | Hs.154797 | KIAA0090 protein | 2.47 | 1927 |
| 401696 | | | Target Exon | 2.47 | |
| 421877 | AW250380 | Hs.109059 | mitochondrial ribosomal protein L12 | 2.47 | 1575 |
| 427351 | AW402593 | Hs.123253 | hypothetical protein FLJ22009 | 2.47 | 2146 |
| 413835 | AI272727 | Hs.249163 | fatty acid hydroxylase | 2.47 | 756 |
| 407863 | AA317089 | Hs.597 | glutamic-oxaloacetic transaminase 1, sol | 2.47 | 209 |
| 441960 | R84940 | Hs.17118 | hypothetical protein FLJ11730 | 2.47 | 3383 |
| 410099 | AA081630 | | KIAA0036 gene product | 2.47 | 444 |
| 405484 | | | C3002124*: gi\|12737280\|ref\|XP_006682.2\|k | 2.47 | |
| 430105 | X70297 | Hs.2540 | cholinergic receptor, nicotinic, alpha p | 2.46 | 2444 5435 |
| 436823 | AW749865 | Hs.117077 | ESTs, Weakly similar to I38022 hypotheti | 2.46 | 3009 |
| 412754 | AW160375 | Hs.74565 | amyloid beta (A4) precursor-like protein | 2.46 | 666 |
| 412646 | NM_006825 | Hs.74368 | transmembrane protein (63 kD), endoplasmi | 2.46 | 4883 653 |
| 436865 | AW880358 | Hs.339808 | hypothetical protein FLJ10120 | 2.46 | 3014 |
| 451653 | W18193 | | ESTs, Moderately similar to HERC2 [H. sap | 2.46 | 4237 |
| 416097 | BE387371 | Hs.118964 | hypothetical protein FLJ20085 | 2.46 | 971 |
| 448474 | AI792014 | Hs.13809 | hypothetical protein FLJ10648 | 2.46 | 3972 |
| 410686 | AI733735 | Hs.114905 | IRE1, S. cerevisiae, homolog of | 2.45 | 506 |
| 408872 | AI476139 | Hs.13291 | ESTs | 2.45 | 313 |
| 407843 | BE155223 | | gb: PM1-HT0350-070100-006-b01 HT0350 Homo | 2.45 | 206 |
| 413010 | AA393273 | Hs.75133 | transcription factor 6-like 1 (mitochond | 2.45 | 689 |
| 453070 | AK001465 | Hs.31575 | SEC63, endoplasmic reticulum translocon | 2.45 | 4372 |
| 427944 | AA417878 | Hs.48401 | ESTs, Moderately similar to ALU8_HUMAN A | 2.45 | 2205 |
| 428169 | AI928984 | Hs.182793 | golgi phosphoprotein 2 | 2.45 | 2225 |
| 410855 | X97795 | Hs.66718 | RAD54 (S. cerevisiae)-like | 2.45 | 4658 518 |
| 434530 | AU077027 | Hs.3887 | proteasome (prosome, macropain) 26S subu | 2.45 | 2846 |
| 459071 | AI992083 | Hs.346566 | ESTs | 2.45 | 4654 |
| 425516 | BE000707 | Hs.29567 | ESTs | 2.45 | 1972 |
| 413230 | R72391 | Hs.16512 | hypothetical protein FLJ21079 | 2.45 | 702 |
| 405010 | | | Target Exon | 2.45 | |
| 438578 | AA811244 | | ESTs | 2.45 | 3151 |
| 405704 | | | NM_001844*: Homo sapiens collagen, type I | 2.45 | 4739 73 |
| 408629 | N58905 | Hs.119206 | ESTs | 2.45 | 285 |
| 415069 | AA159831 | Hs.29286 | ESTs, Weakly similar to I49636 DNA-bindi | 2.45 | 905 |
| 437748 | AF234882 | Hs.5814 | suppression of tumorigenicity 7 | 2.45 | 3087 5591 |
| 411402 | BE297855 | Hs.69855 | NRAS-related gene | 2.45 | 552 |
| 406671 | AA129547 | Hs.285754 | met proto-oncogene (hepatocyte growth fa | 2.45 | 82 |
| 407321 | AA156538 | Hs.22546 | gb: zo34c06.s1 Stratagene colon (937204) | 2.45 | 152 |
| 408418 | AW963897 | Hs.44743 | KIAA1435 protein | 2.45 | 266 |
| 443230 | T80789 | Hs.132973 | ESTs | 2.45 | 3511 |
| 442329 | AA991795 | Hs.129289 | ESTs | 2.45 | 3420 |
| 446782 | AI653048 | Hs.144006 | solute carrier family 6 (neurotransmitte | 2.45 | 3785 |
| 410062 | AW974756 | Hs.46476 | ESTs | 2.45 | 437 |
| 425170 | AU077315 | Hs.154970 | transcription factor CP2 | 2.45 | 1932 |
| 445571 | AI378000 | Hs.158489 | ESTs, Weakly similar to Z184_HUMAN ZINC | 2.45 | 3686 |
| 450684 | AA872605 | Hs.25333 | interleukin 1 receptor, type II | 2.45 | 4148 |
| 420608 | BE548277 | Hs.103104 | ESTs | 2.45 | 1436 |
| 418882 | NM_004996 | Hs.89433 | ATP-binding cassette, sub-family C (CFTR | 2.45 | 1254 5033 |
| 424081 | NM_006413 | Hs.139120 | ribonuclease P (30 kD) | 2.45 | 1801 5197 |
| 431242 | AA987742 | Hs.347534 | KIAA1201 protein | 2.45 | 2543 |
| 439492 | AF086310 | Hs.103159 | ESTs | 2.45 | 3212 |
| 434360 | AW015415 | Hs.127780 | ESTs | 2.45 | 2833 |
| 420747 | BE294407 | Hs.99910 | phosphofructokinase, platelet | 2.45 | 1448 |
| 403167 | | | Target Exon | 2.45 | |
| 429227 | AI961456 | Hs.21275 | hypothetical protein FLJ11011 | 2.45 | 2339 |
| 435800 | AI248285 | Hs.118348 | ESTs | 2.44 | 2945 |
| 409935 | AW511413 | Hs.278025 | ESTs | 2.44 | 420 |
| 407712 | X66893 | Hs.37953 | Fanconi anemia, complementation group C | 2.44 | 185 4780 |
| 449112 | BE564123 | Hs.23060 | DKFZP564F0522 protein | 2.44 | 4038 |
| 420460 | AA262331 | Hs.48376 | Homo sapiens clone HB-2 mRNA sequence | 2.44 | 1423 |
| 431044 | U93850 | Hs.259855 | elongation factor-2 kinase | 2.44 | 2525 5468 |
| 416817 | AA398045 | Hs.104679 | ESTs | 2.44 | 1028 |
| 429604 | AK001851 | Hs.210778 | hypothetical protein FLJ10989 | 2.44 | 2393 5413 |
| 410717 | AW817608 | Hs.130849 | peptide deformylase-like protein | 2.44 | 510 |
| 428028 | U52112 | Hs.182018 | interleukin-1 receptor-associated kinase | 2.44 | 2215 |
| 424572 | M19650 | Hs.179600 | 2′,3′-cyclic nucleotide 3′ phosphodieste | 2.44 | 1859 5218 |
| 448100 | AV655272 | Hs.20252 | novel Ras family protein | 2.44 | 3941 |
| 435468 | AW362803 | Hs.166271 | ESTs | 2.44 | 2916 |
| 448112 | AW245919 | Hs.34969 | hypothetical protein DKFZp566N034 | 2.43 | 3944 |
| 428242 | H55709 | Hs.2250 | leukemia inhibitory factor (cholinergic | 2.43 | 2233 |
| 400247 | | | Eos Control | 2.43 | |
| 439955 | AW203959 | Hs.149532 | ESTs | 2.43 | 3249 |
| 424135 | AW994455 | Hs.140978 | Homo sapiens mRNA: cDNA DKFZp762H106 (fr | 2.43 | 1807 |
| 417534 | NM_004998 | Hs.82251 | myosin IE | 2.43 | 1100 4989 |
| 405276 | | | NM_019854: Homo sapiens HMT1 (hnRNP methy | 2.43 | 4733 67 |
| 403349 | | | ephrin-B3 | 2.43 | |
| 443281 | AI042304 | Hs.74635 | dihydrolipoamide dehydrogenase (E3 compo | 2.43 | 3516 |
| 411358 | R47479 | Hs.94761 | KIAA1691 protein | 2.43 | 548 |
| 423493 | AI815965 | Hs.129683 | ubiquitin-conjugating enzyme E2D 1 (Homo | 2.43 | 1753 |
| 432586 | AA568548 | | ESTs | 2.43 | 2681 |
| 423393 | R37772 | Hs.21420 | p21-activated protein kinase 6 | 2.42 | 1741 |
| 407907 | AI752235 | Hs.41270 | procollagen-lysine, 2-oxoglutarate 5-dio | 2.42 | 214 |
| 418699 | BE539639 | Hs.173030 | ESTs, Weakly similar to ALU8_HUMAN ALU S | 2.42 | 1229 |
| 432828 | AB042326 | Hs.287402 | chondroitin 4-sulfotransferase | 2.42 | 2702 5515 |
| 447388 | AW630534 | Hs.76277 | Homo sapiens, clone MGC: 9381, mRNA, comp | 2.42 | 3854 |
| 432623 | AA557351 | Hs.152448 | ESTs, Moderately similar to S14147 multi | 2.42 | 2686 |
| 442452 | AI479592 | Hs.324342 | ESTs | 2.42 | 3432 |
| 446777 | AW138243 | | ESTs | 2.42 | 3784 |
| 405451 | | | Homo sapiens glutaminyl-peptide cyclotra | 2.42 | |
| 428166 | AA423849 | Hs.79530 | M5-14 protein | 2.41 | 2224 |
| 419705 | AW368634 | Hs.154331 | ESTs | 2.41 | 1351 |
| 403961 | | | Target Exon | 2.41 | |
| 422243 | AW803733 | Hs.23585 | hypothetical protein MGC12250 | 2.41 | 1618 |
| 441941 | AI953261 | Hs.169813 | hypothetical protein FLJ23040 | 2.41 | 3380 |
| 457332 | AA961694 | Hs.105187 | kinesin protein 9 gene | 2.41 | 4587 |
| 424511 | BE300512 | Hs.193557 | ESTs, Moderately similar to ALU7_HUMAN A | 2.41 | 1854 |
| 431563 | AI027643 | Hs.120912 | ESTs | 2.41 | 2567 |
| 447501 | AI954692 | Hs.159400 | ESTs | 2.41 | 3871 |
| 418650 | BE386750 | Hs.86978 | prolyl endopeptidase | 2.41 | 1219 |
| 415558 | AA885143 | Hs.125719 | ESTs | 2.41 | 937 |
| 450791 | R84948 | Hs.60473 | RFamide-related peptide precursor | 2.41 | 4166 |
| 427673 | AI989709 | | gb: ws35f01.x1 NCI_CGAP_GC6 Homo sapiens | 2.41 | 2176 |
| 437576 | BE514383 | | prothymosin, alpha (gene sequence 28) | 2.40 | 3070 |
| 417831 | H16423 | Hs.82685 | CD47 antigen (Rh-related antigen, integr | 2.40 | 1128 |
| 421778 | AA428000 | Hs.283072 | actin related protein 2/3 complex, subun | 2.40 | 1563 |
| 449082 | BE387561 | Hs.22981 | DKFZP586M1523 protein | 2.40 | 4034 |
| 410219 | T98226 | Hs.171952 | occludin | 2.40 | 457 |
| 431583 | AL042613 | Hs.262476 | S-adenosylmethionine decarboxylase 1 | 2.40 | 2571 |
| 446173 | BE565849 | Hs.14158 | copine III | 2.40 | 3733 |
| 409929 | R38772 | Hs.172619 | myelin transcription factor 1-like | 2.40 | 419 |
| 405863 | | | Target Exon | 2.40 | |
| 417587 | AI911492 | Hs.12489 | ESTs | 2.40 | 1104 |
| 434159 | AW135214 | Hs.191828 | ESTs | 2.40 | 2816 |
| 448964 | N63996 | Hs.289083 | ESTs | 2.40 | 4022 |
| 425216 | U81504 | Hs.155172 | adaptor-related protein complex 3, beta | 2.40 | 1938 5252 |
| 430448 | AI633553 | Hs.13303 | Homo sapiens cDNA: FLJ21784 fis, clone H | 2.40 | 2485 |
| 414754 | AW938668 | | gb: PM1-DT0063-160200-003-c07 DT0063 Homo | 2.40 | 874 |
| 443073 | AI032321 | | ESTs | 2.40 | 3494 |
| 450904 | R07118 | Hs.189924 | ESTs | 2.40 | 4174 |
| 425908 | BE281602 | Hs.161751 | zinc finger protein 256 | 2.40 | 2011 |
| 412846 | AW961245 | Hs.55896 | Homo sapiens PAC clone RP5-978E18 from 7 | 2.40 | 677 |
| 415641 | Z44481 | | gb: HSC21E071 normalized infant brain cDN | 2.40 | 940 |
| 405258 | | | Target Exon | 2.40 | |
| 445866 | H20899 | Hs.13399 | Homo sapiens clone 25032 mRNA sequence | 2.40 | 3704 |
| 402412 | | | Target Exon | 2.40 | |
| 447842 | AW160804 | Hs.247302 | twisted gastrulation | 2.40 | 3913 |
| 434405 | AF171055 | Hs.20030 | Homo sapiens thioredoxin reductase 3 (TR | 2.40 | 2838 5547 |
| 428328 | AA426080 | Hs.292812 | ESTs, Weakly similar to I38022 hypotheti | 2.40 | 2240 |
| 400567 | | | Target Exon | 2.40 | |
| 453374 | AI990091 | Hs.75893 | ankyrin 3, node of Ranvier (ankyrin G) | 2.40 | 4401 |
| 429250 | H56585 | Hs.198308 | tryptophan rich basic protein | 2.40 | 2343 |
| 426996 | AW968934 | Hs.173108 | Homo sapiens cDNA: FLJ21897 fis, clone H | 2.40 | 2119 |
| 442607 | AA507576 | Hs.288361 | Homo sapiens cDNA: FLJ22696 fis, clone H | 2.40 | 3452 |
| 440534 | BE561168 | | gb: 601344888F1 NIH_MGC_8 Homo sapiens cD | 2.40 | 3295 |
| 420968 | AW968775 | | ESTs | 2.40 | 1470 |
| 443829 | AI087954 | Hs.23348 | S-phase kinase-associated protein 2 (p45 | 2.40 | 3557 |
| 417581 | R26968 | Hs.24104 | ESTs, Weakly similar to ALU7_HUMAN ALU S | 2.40 | 1103 |
| 442072 | AI740832 | Hs.12311 | Homo sapiens clone 23570 mRNA sequence | 2.40 | 3395 |
| 443197 | Z43613 | | gb: HSC1GD091 normalized infant brain cDN | 2.40 | 3507 |
| 412193 | AI684467 | Hs.144057 | ESTs | 2.40 | 617 |
| 408826 | AF216077 | Hs.48376 | Homo sapiens clone HB-2 mRNA sequence | 2.40 | 309 |
| 422321 | AA906427 | Hs.181035 | hypothetical protein MGC11296 | 2.40 | 1631 |
| 447769 | AW873704 | Hs.320831 | Homo sapiens cDNA FLJ14597 fis, clone NT | 2.40 | 3903 |
| 422631 | BE218919 | Hs.118793 | hypothetical protein FLJ10688 | 2.40 | 1665 |
| 447958 | AW796524 | Hs.68644 | Homo sapiens microsomal signal peptidase | 2.40 | 3926 |
| 423430 | AF112481 | Hs.128501 | RAD54, S. cerevisiae, homolog of, B | 2.40 | 1744 |
| 422981 | AF026445 | Hs.122752 | TATA box binding protein (TBP)-associate | 2.40 | 1706 5165 |
| 418330 | BE409405 | | ESTs | 2.40 | 1187 |
| 434627 | AI221894 | Hs.39311 | ESTs | 2.40 | 2853 |
| 445098 | AL050272 | Hs.12305 | DKFZP566B183 protein | 2.40 | 3651 5651 |
| 446711 | AF169692 | Hs.12450 | protocadherin 9 | 2.40 | 3776 5675 |
| 447495 | AW401864 | Hs.18720 | programmed cell death 8 (apoptosis-induc | 2.40 | 3868 |
| 450825 | AC005954 | Hs.25527 | tight junction protein 3 (zona occludens | 2.40 | 4170 5736 |
| 421526 | AL080121 | Hs.105460 | DKFZP564O0823 protein | 2.40 | 1534 5114 |
| 431605 | AW972407 | Hs.124370 | gb: EST384498 MAGE resequences, MAGL Homo | 2.39 | 2574 |
| 429612 | AF062649 | Hs.252587 | pituitary tumor-transforming 1 | 2.39 | 2396 5416 |
| 419170 | BE002798 | Hs.287850 | integral membrane protein 1 | 2.39 | 1285 |
| 437271 | AL137445 | Hs.28846 | Homo sapiens mRNA; cDNA DKFZp566O134 (fr | 2.39 | 3052 |
| 458097 | AW341135 | Hs.58104 | ESTs | 2.39 | 4610 |
| 426105 | AW962732 | | gb: EST374805 MAGE resequences, MAGG Homo | 2.39 | 2027 |
| 414075 | U11862 | Hs.75741 | amiloride binding protein 1 (amine oxida | 2.39 | 4913 785 |
| 445994 | NM_004724 | Hs.13512 | ZW10 (Drosophila) homolog, centromere/ki | 2.39 | 3716 5661 |
| 420186 | NM_015925 | Hs.95697 | liver-specific bHLH-Zip transcription fa | 2.39 | 1392 5066 |
| 404109 | | | C6000844*: gi\|7497891\|pir\|\|T20194 hypothe | 2.39 | 52 |
| 431341 | AA307211 | Hs.251531 | proteasome (prosome, macropain) subunit, | 2.39 | 2549 |
| 409703 | NM_006187 | Hs.56009 | 2′-5′-oligoadenylate synthetase 3 (100 k | 2.39 | 396 4831 |
| 445834 | AI913290 | Hs.145532 | ESTs, Weakly similar to FV1 MOUSE FRIEND | 2.38 | 3701 |
| 449636 | AI656608 | Hs.281328 | ESTs, Weakly similar to T00378 KIAA0641 | 2.38 | 4071 |
| 425081 | X74794 | Hs.154443 | minichromosome maintenance deficient (S. | 2.38 | 1918 5246 |
| 414368 | W70171 | Hs.75939 | uridine monophosphate kinase | 2.38 | 818 |
| 431698 | AI492369 | | ESTs | 2.38 | 2585 |
| 431549 | AA507036 | Hs.170673 | ESTs | 2.38 | 2565 |
| 418731 | AI264688 | Hs.1197 | heat shock 10 kD protein 1 (chaperonin 10 | 2.38 | 1233 |
| 414111 | BE047679 | Hs.152982 | hypothetical protein FLJ13117 | 2.38 | 789 |
| 431356 | AW499632 | Hs.288512 | Homo sapiens cDNA FLJ11632 fis, clone HE | 2.38 | 2550 |
| 443048 | AW013982 | Hs.250114 | ESTs | 2.38 | 3490 |
| 431049 | AA846576 | Hs.103267 | hypothetical protein FLJ22548 similar to | 2.38 | 2527 |
| 409129 | AW296699 | Hs.103521 | serine arginine-rich pre-mRNA splicing f | 2.38 | 337 |
| 453323 | AF034102 | Hs.32951 | solute carrier family 29 (nucleoside tra | 2.37 | 4395 5775 |
| 449022 | NM_016331 | Hs.22879 | zinc finger protein ANC_2H01 | 2.37 | 4029 5718 |
| 418068 | AW971155 | Hs.293902 | ESTs, Weakly similar to ISHUSS protein d | 2.37 | 1157 |
| 431317 | AA502682 | | gb: ng23d01.s1 NCI_CGAP_Ov2 Homo sapiens | 2.37 | 2547 |
| 430315 | NM_004293 | Hs.239147 | guanine deaminase | 2.37 | 2469 5444 |
| 443162 | T49951 | Hs.9029 | DKFZP434G032 protein | 2.37 | 3500 |
| 418583 | AA604379 | Hs.86211 | hypothetical protein | 2.37 | 1214 |
| 417008 | AA191708 | Hs.325825 | Homo sapiens cDNA FLJ20848 fis, clone AD | 2.37 | 1050 |
| 459057 | AW005512 | | ESTs, Weakly similar to A61262 collagen | 2.37 | 4653 |
| 447120 | AI380413 | Hs.233297 | ESTs | 2.37 | 3824 |
| 427712 | AI368024 | Hs.283696 | ESTs | 2.37 | 2187 |
| 435099 | AC004770 | Hs.4756 | flap structure-specific endonuclease 1 | 2.37 | 2896 5563 |
| 421878 | AA299652 | Hs.111496 | Homo sapiens cDNA FLJ11643 fis, clone HE | 2.37 | 1576 |
| 434614 | AI249502 | Hs.29669 | ESTs | 2.37 | 2852 |
| 413437 | BE313164 | Hs.75361 | gene from NF2/meningioma region of 22q12 | 2.37 | 722 |
| 428821 | H91282 | Hs.286232 | Homo sapiens cDNA: FLJ23190 fis, clone L | 2.36 | 2304 |
| 419897 | X90826 | Hs.93649 | upstream transcription factor 2, c-fos i | 2.36 | 1366 5059 |
| 437016 | AU076916 | Hs.5398 | guanise mosphosphate synthetase | 2.36 | 3027 |
| 421011 | BE300408 | Hs.119699 | hypothetical protein FLJ12969 | 2.36 | 1474 |
| 409407 | AW967370 | Hs.342655 | Homo sapiens cDNA FLJ13289 fis, clone OV | 2.36 | 367 |
| 415204 | T27434 | | gb: hbc2294 Human pancreatic islet Homo s | 2.36 | 915 |
| 449162 | AI632740 | Hs.10476 | ESTs | 2.36 | 4041 |
| 429238 | NM_002849 | Hs.198288 | protein tyrosine phosphalase, receptor t | 2.36 | 2341 5395 |
| 449955 | AI676010 | Hs.224043 | ESTs | 2.36 | 4093 |
| 449791 | AI248740 | Hs.133323 | ESTs | 2.36 | 4083 |
| 422515 | AW500470 | Hs.117950 | multifunctional polypeptide similar to S | 2.36 | 1651 |
| 419102 | AA234098 | Hs.42424 | ESTs, Weakly similar to 2004399A chromos | 2.36 | 1276 |
| 411734 | AW374954 | Hs.71779 | Homo sapiens DNA from chromosome 19, cos | 2.36 | 572 |
| 405723 | | | Target Exon | 2.36 | |
| 456623 | AI084125 | Hs.108106 | transcription factor | 2.36 | 4555 |
| 442013 | AA506476 | Hs.82689 | Human DNA sequence from clone RP11-353C1 | 2.36 | 3388 |
| 429770 | AI766047 | Hs.99736 | ESTs | 2.36 | 2415 |
| 407317 | AI204033 | Hs.30792 | ESTs, Weakly similar to I38022 hypotheti | 2.35 | 151 |
| 421910 | NM_014586 | Hs.109437 | hormonally upregulated neu tumor-associa | 2.35 | 1579 5128 |
| 404120 | | | C5000537*: gi\|3298595\|gb\|AAC41376.1\|(AF0 | 2.35 | |
| 452483 | AI903731 | Hs.106357 | valosin-containing protein | 2.35 | 4316 |
| 435755 | AA805263 | Hs.123176 | ESTs | 2.35 | 2940 |
| 428550 | AW297880 | Hs.98661 | ESTs | 2.35 | 2269 |
| 449158 | AI990849 | | ESTs | 2.35 | 4040 |
| 449256 | AA059050 | Hs.59847 | ESTs | 2.35 | 4051 |
| 442617 | AW340093 | Hs.130538 | ESTs | 2.35 | 3454 |
| 459557 | N58315 | | gh: yv68g06.s1 Soares fetal liver spleen | 2.35 | 4672 |
| 425363 | BE161577 | Hs.10119 | hypothetical protein FLJ14957 | 2.35 | 1954 |
| 448030 | N30714 | Hs.325960 | membrane-spanning 4-domains, subfamily A | 2.35 | 3936 |
| 437159 | AL050072 | Hs.306313 | Homo sapiens mRNA; cDNA DKFZp566E1346 (f | 2.35 | 3040 |
| 440462 | T71629 | Hs.100554 | ESTs | 2.35 | 3290 |
| 458375 | AI885827 | Hs.7149 | ESTs, Weakly similar to T13963 formin re | 2.35 | 4621 |
| 454645 | AW811928 | | gb: RC2-ST0168-240300-017-b02 ST0168 Homo | 2.35 | 4493 |
| 435126 | AI393666 | Hs.42315 | p10-binding protein | 2.35 | 2898 |
| 411226 | AW833022 | | gb: RC3-TT0005-191099-012-d04 TT0005 Homo | 2.35 | 540 |
| 402285 | | | sclerostin | 2.35 | |
| 423805 | AA331242 | Hs.197030 | gb: EST35320 Embryo, 8 week I Homo sapien | 2.35 | 1777 |
| 446338 | AI289121 | Hs.206978 | ESTs | 2.35 | 3745 |
| 400817 | | | Target Exon | 2.35 | |
| 459507 | AW298279 | Hs.255756 | ESTs | 2.35 | 4669 |
| 425368 | AB014595 | Hs.155976 | cullin 4B | 2.35 | 1956 5258 |
| 425212 | AW962253 | Hs.171618 | ESTs | 2.35 | 1937 |
| 426098 | NM_014906 | Hs.166351 | KIAA1072 protein | 2.35 | 2026 5291 |
| 457653 | AI820719 | Hs.76853 | DnaJ (Hsp40) homolog, subfamily A, membe | 2.35 | 4597 |
| 432281 | AK001239 | Hs.274263 | hypothetical protein FLJ10377 | 2.35 | 2652 5505 |
| 418592 | X99226 | Hs.284153 | Fanconi anemia, complementation group A | 2.35 | 1215 5020 |
| 402505 | | | C1003830: gi\|3983382\|gb\|AAD13319.1\| (AF10 | 2.35 | |
| 410415 | BE241626 | Hs.285833 | Homo sapiens cDNA: FLJ22135 fis, clone H | 2.35 | 475 |
| 418216 | AA662240 | Hs.283099 | AF15q14 protein | 2.35 | 1171 |
| 459200 | Y09306 | Hs.30148 | homeodomain-isteracting protein kinase 3 | 2.35 | 4658 5818 |
| 413320 | NM_005191 | Hs.838 | CD80 antigen (CD28 antigen ligand 1, B7- | 2.35 | 4898 710 |
| 430084 | AA748878 | Hs.281764 | ESTs | 2.35 | 2443 |
| 412043 | BE156622 | Hs.333371 | Homo sapiens clone TA40 untranslated mRN | 2.35 | 604 |
| 446651 | AA393907 | Hs.97179 | ESTs | 2.35 | 3775 |
| 431696 | AA259068 | Hs.267819 | protein phosphatase 1, regulatory (inhib | 2.35 | 2584 |
| 451065 | AW295132 | Hs.222231 | ESTs, Weakly similar to granule cell mar | 2.35 | 4188 |
| 451232 | AI769922 | Hs.20023 | ESTs | 2.35 | 4201 |
| 416018 | AW138239 | Hs.78977 | proprotein convertase subtilisin/kexin t | 2.35 | 966 |
| 448762 | H19006 | Hs.184780 | ESTs | 2.35 | 4004 |
| 432226 | AW182766 | Hs.273558 | phosphate cytidylyltransferase 1, cholin | 2.35 | 2645 |
| 435062 | BE501995 | Hs.282228 | ESTs | 2.35 | 2892 |
| 417239 | AA854504 | Hs.85956 | ESTs, Weakly similar to B28096 line-1 pr | 2.35 | 1074 |
| 450724 | R55428 | | gb: yj79b05.r1 Soares breast 2NbHBst Homo | 2.35 | 4154 |
| 425048 | H05468 | Hs.164502 | ESTs | 2.35 | 1914 |
| 453455 | AA063553 | Hs.221931 | ESTs, Weakly similar to JC1087 RNA helic | 2.35 | 4408 |
| 434874 | N62448 | Hs.293970 | methylmalonate-semialdehyde dehydrogenas | 2.35 | 2876 |
| 409187 | AF154830 | Hs.50966 | carbamoyl-phosphate synthetase 1, mitoch | 2.35 | 347 4816 |
| 444261 | AA298958 | Hs.10724 | MDS023 protein | 2.35 | 3585 |
| 414205 | BE382438 | | Homo sapiens, clone IMAGE: 3690478, mRNA, | 2.35 | 799 |
| 428862 | NM_000346 | Hs.2316 | SRY (sex determining region Y)-box 9(Ca | 2.35 | 2313 5382 |
| 448633 | AA311426 | Hs.21635 | tubulin, gamma 1 | 2.35 | 3990 |
| 418758 | AW9593151 | Hs.172012 | hypothetical protein DKFZp434J037 | 2.35 | 1237 |
| 420783 | AI659838 | Hs.99923 | lectin, galactoside-binding, soluble, 7 | 2.35 | 1453 |
| 439866 | AA280717 | Hs.6727 | Ras-GTPase activating protein SH3 domain | 2.35 | 3240 |
| 454003 | AA058944 | Hs.116602 | Homo sapiens, clone IMAGE: 4154008, mRNA, | 2.34 | 4460 |
| 458866 | BE616694 | Hs.288042 | hypothetical protein FLJ14299 | 2.34 | 4641 |
| 425532 | AB007915 | Hs.158286 | KIAA0446 gene product | 2.34 | 1976 5271 |
| 436420 | AA443966 | Hs.31595 | ESTs | 2.34 | 2984 |
| 420542 | NM_000505 | Hs.1321 | coagulation factor XII (Hageman factor) | 2.34 | 1428 5080 |
| 417389 | BE260964 | Hs.82045 | midkine (neurite growth-promoting factor | 2.34 | 1091 |
| 407704 | BE315072 | Hs.78768 | malignant cell expression-enhanced gene/ | 2.34 | 184 |
| 421649 | AA721217 | Hs.106415 | peroxisome proliferative activated recep | 2.34 | 1549 |
| 424042 | Y10601 | Hs.137674 | ankyrin-like with transmembrane domains | 2.34 | 1794 5195 |
| 414883 | AA926960 | | CDC28 protein kinase 1 | 2.34 | 887 |
| 414270 | L20852 | Hs.347527 | solute carrier family 20 (phosphate tran | 2.34 | 4915 806 |
| 428698 | AA852773 | Hs.334838 | KIAA1866 protein | 2.34 | 2283 |
| 410170 | AI700481 | Hs.299629 | peroxisomal long-chain acyl-coA thioeste | 2.34 | 452 |
| 422567 | AF111178 | Hs.118407 | glypican 6 | 2.34 | 1658 5154 |
| 418418 | R61527 | Hs.237517 | ESTs | 2.34 | 1198 |
| 407661 | AW063497 | Hs.279821 | ESTs | 2.33 | 178 |
| 450088 | AW292933 | Hs.254110 | ESTs | 2.33 | 4104 |
| 427279 | AW971391 | Hs.28113 | ESTs, Weakly similar to KIAA0349 [H. sapi | 2.33 | 2136 |
| 417133 | N49848 | Hs.104091 | ESTs | 2.33 | 1064 |
| 419457 | AA243146 | Hs.209334 | ESTs, Moderately similar to S23A_HUMAN P | 2.33 | 1315 |
| 405215 | | | Target Exon | 2.33 | |
| 449186 | AW291876 | Hs.196986 | ESTs | 2.33 | 4042 |
| 445929 | AI089660 | Hs.323401 | dpy-30-like protein | 2.33 | 3714 |
| 425265 | BE245297 | | gb: TCBAP1E2482 Pediatric pre-B cell acut | 2.33 | 1946 |
| 402008 | | | Target Exon | 2.33 | |
| 449207 | AL044222 | Hs.23255 | nucleoporin 155 kD | 2.33 | 4045 |
| 432842 | AW674093 | Hs.334822 | hypothetical protein MGC4485 | 2.33 | 2705 |
| 420089 | AW003785 | Hs.170267 | ESTs | 2.33 | 1382 |
| 447966 | AA340605 | Hs.105887 | ESTs, Weakly similar to Homolog of rat Z | 2.33 | 3928 |
| 418951 | F07809 | Hs.89506 | paired box gene 6 (aniridia, keratitis) | 2.33 | 1262 |
| 405387 | | | NM_022170*: Homo sapiens Williams-Beuren | 2.33 | 4736 70 |
| 412124 | H43378 | | Homo sapiens cDNA: FLJ23156 fis, clone L | 2.33 | 611 |
| 417018 | M16038 | Hs.80887 | v-yes-1 Yamaguchi sarcoma viral related | 2.33 | 1053 4976 |
| 405573 | | | Target Exon | 2.32 | |
| 422253 | W81526 | Hs.118329 | ESTs, Moderately similar to GAD_HUMAN GA | 2.32 | 1621 |
| 422363 | T55979 | Hs.115474 | replication factor C (activator 1) 3 (38 | 2.32 | 1636 |
| 413952 | AA806187 | Hs.289101 | glucose regulated protein, 58 kD | 2.32 | 769 |
| 407649 | BE066724 | Hs.37427 | erythrocyte membrane protein band 4.1 (e | 2.32 | 177 |
| 413492 | D87470 | Hs.75400 | KIAA0280 protein | 2.32 | 4903 728 |
| 413753 | U17760 | Hs.75517 | laminin, beta 3 (nicein (125 kD), kalinin | 2.32 | 4906 750 |
| 446506 | AI123118 | Hs.15159 | chemokine-like factor, alternatively spl | 2.32 | 3757 |
| 444734 | NM_001360 | Hs.11806 | 7-dehydrocholesterol reductase | 2.32 | 3622 5644 |
| 437210 | AA311443 | Hs.293563 | Homo sapiens mRNA; cDNA DKFZp586E2317 (f | 2.32 | 3045 |
| 407027 | U63312 | | gb: Human cosmid LL12NCO1-242E1, ETV6 gen | 2.31 | 120 4763 |
| 407252 | AA659037 | Hs.163780 | ESTs | 2.31 | 146 |
| 408075 | AA382881 | Hs.42409 | CGI-146 protein | 2.31 | 231 |
| 452767 | AW014195 | Hs.61472 | ESTs, Weakly similar to YAE6_YEAST HYPOT | 2.31 | 4343 |
| 426516 | BE262660 | Hs.170197 | glutamic-oxaloacetic transaminase 2, mit | 2.31 | 2074 |
| 423864 | BE275607 | Hs.1708 | chaperonin containing TCP1, subunit 3 (g | 2.31 | 1781 |
| 402663 | | | C1002133: gi\|12697931\|dbj\|BAB21784.1\|(AB | 2.31 | |
| 452482 | BE155356 | | gb: PM1-HT0350-160300-009-d06 HT0350 Homo | 2.31 | 4315 |
| 419535 | AW139550 | Hs.115173 | ESTs | 2.31 | 1326 |
| 446335 | BE174202 | Hs.156067 | Homo sapiens cDNA: FLJ21061 fis, clone C | 2.31 | 3744 |
| 420552 | AK000492 | Hs.98806 | hypothetical protein | 2.31 | 1430 5081 |
| 457461 | AL122087 | Hs.272304 | Homo sapiens mRNA; cDNA DKFZp564C0371 (f | 2.31 | 4591 |
| 401917 | | | RAN binding protein 3 | 2.31 | |
| 427678 | BE267756 | Hs.180312 | mitochondrial ribosomal protein S16 | 2.31 | 2180 |
| 429857 | AF089897 | Hs.294030 | topoisomerase-related function protein 4 | 2.30 | 2419 5428 |
| 437613 | R19892 | Hs.10267 | MIL1 protein | 2.30 | 3075 |
| 429162 | AK001250 | Hs.197642 | hypothetical protein FLJ10388 | 2.30 | 2334 5391 |
| 427051 | BE178110 | Hs.173374 | Homo sapiens cDNA FLJ10500 fis, clone NT | 2.30 | 2123 |
| 432407 | AA221036 | Hs.13273 | gb: zr03f12.r1 Stratagene NT2 neuronal pr | 2.30 | 2664 |
| 415099 | AI492170 | Hs.77917 | ubiquitin carboxyl-terminal esterase L3 | 2.30 | 907 |
| 432543 | AA552690 | Hs.152423 | Homo sapiens cDNA: FLJ21274 fis, clone C | 2.30 | 2679 |
| 446237 | AW270515 | Hs.149596 | Homo sapiens, Similar to RIKEN cDNA 2310 | 2.30 | 3738 |
| 436668 | AA831857 | Hs.209071 | ESTs | 2.30 | 3001 |
| 452146 | AW135654 | | p47 | 2.30 | 4276 |
| 404494 | | | C8001441*V: gi\|8923061\|ref\|NP_060114.1\|hy | 2.30 | |
| 426262 | AI792141 | Hs.196270 | folate transporter/carrier | 2.30 | 2045 |
| 439019 | AF085902 | Hs.271737 | ESTs | 2.30 | 3182 |
| 400639 | | | C10000999*: gi\|2143593\|pir\|\|S55277 annexi | 2.30 | 19 |
| 454204 | AW818498 | | gb: QVO-ST0236-171299-075-b02 ST0236 Homo | 2.30 | 4472 |
| 424194 | BE245833 | Hs.169854 | gb: TCBAP1E1908 Pediatric pre-B cell acut | 2.30 | 1813 |
| 421093 | AA906434 | Hs.3776 | zinc finger protein 216 | 2.30 | 1480 |
| 435276 | AI022399 | Hs.186934 | ESTs | 2.30 | 2906 |
| 451084 | N30113 | Hs.299014 | ESTs | 2.30 | 4190 |
| 409078 | AW327515 | | ESTs | 2.30 | 331 |
| 412661 | N32860 | Hs.24611 | ESTs, Weakly similar to I54374 gene NF2 | 2.30 | 657 |
| 418150 | AA973762 | Hs.22222 | hypothetical protein MGC10854 | 2.30 | 1164 |
| 411688 | AW953440 | | gb: EST365510 MAGE resequences, MAGB Homo | 2.30 | 570 |
| 437863 | AA769989 | | ESTs, Moderately similar to ZN91_HUMAN Z | 2.30 | 3100 |
| 445523 | Z30118 | Hs.293788 | ESTs, Moderately similar to unnamed prot | 2.30 | 3682 |
| 421674 | T10707 | Hs.296355 | hypothetical protein FLJ23138 | 2.30 | 1553 |
| 405705 | | | C12000104*: gi\|4503519\|ref\|NP_003745.1\| e | 2.30 | |
| 409872 | AW502313 | | gb: UI-HF-BR0p-ajs-d-08-0-UI.r1 NIH_MGC_5 | 2.30 | 411 |
| 440612 | BE561384 | | gb: 601344969F1 NIH_MGC_8 Homo sapiens CD | 2.30 | 3305 |
| 422408 | AI340322 | Hs.156928 | Homo sapiens cDNA: FLJ21942 fis, clone H | 2.30 | 1641 |
| 429433 | AA452899 | Hs.213586 | ESTs, Weakly similar to KIAA1353 protein | 2.30 | 2368 |
| 406930 | U04691 | | gb: Human olfactory receptor (OR17-219) g | 2.30 | 111 4757 |
| 448472 | BE612556 | Hs.47783 | B aggressive lymphoma gene | 2.30 | 3971 |
| 419852 | AW503756 | Hs.286184 | hypothetical protein dJ551D2.5 | 2.30 | 1363 |
| 440097 | AI079949 | Hs.134192 | ESTs | 2.30 | 3261 |
| 455540 | BE080231 | | gb: RC4-BT0629-120200-012-f11 BT0629 Homo | 2.30 | 4514 |
| 424316 | AA676403 | Hs.145078 | regulator of differentiation (in S. pomb | 2.30 | 1829 |
| 404423 | | | C8000067*: gi\|10432400\|emb\|CAC10290.1\| (A | 2.30 | |
| 427548 | AA813784 | Hs.123001 | ESTs | 2.30 | 2164 |
| 438171 | AW976507 | | ESTs | 2.30 | 3123 |
| 431611 | U58766 | Hs.264428 | tissue specific transplantation antigen | 2.30 | 2575 5482 |
| 440100 | BE382685 | Hs.158549 | ESTs, Weakly similar to T2D3_HUMAN TRANS | 2.30 | 3263 |
| 417750 | AI267720 | Hs.260523 | synovial sarcoma, translocated to X chro | 2.30 | 1120 |
| 426088 | AF038007 | Hs.166196 | ATPase, Class I, type 8B, member 1 | 2.30 | 2024 5289 |
| 414485 | W27026 | Hs.182625 | VAMP (vesicle-associated membrane protei | 2.30 | 835 |
| 411007 | AA311529 | Hs.67619 | hypothetical protein My014 | 2.30 | 527 |
| 410512 | AA085603 | Hs.250570 | hypothetical protein MGC3180 | 2.30 | 487 |
| 426427 | M86699 | Hs.169840 | UK protein kinase | 2.30 | 2065 5303 |
| 437897 | AA770561 | Hs.146170 | hypothetical protein FLJ22969 | 2.30 | 3104 |
| 431462 | AW583672 | Hs.256311 | granin-like neuroendocrine peptide precu | 2.30 | 2557 |
| 458820 | BE552151 | Hs.108118 | hypothetical protein FLJ22474 | 2.30 | 4640 |
| 422678 | AA247778 | Hs.119155 | Homo sapiens mRNA full length insert cDN | 2.30 | 1672 |
| 430640 | AA482636 | Hs.209561 | KIAA1715 protein | 2.30 | 2502 |
| 428157 | AI738719 | Hs.198427 | hexokinase 2 | 2.30 | 2223 |
| 443015 | R33261 | Hs.6614 | ESTs, Weakly similar to A43932 mucin 2 p | 2.30 | 3487 |
| 426860 | U04953 | Hs.172801 | isoleucine-tRNA synthetase | 2.29 | 2107 5325 |
| 437150 | R51407 | Hs.77910 | 3-hydroxy-3-methylglutaryl-Coenzyme A sy | 2.29 | 3038 |
| 401913 | | | ENSP00000249158*: CDNA | 2.29 | |
| 442592 | BE566623 | Hs.29899 | ESTs, Weakly similar to G02075 transcrip | 2.29 | 3450 |
| 446038 | AW162917 | Hs.321635 | gb: au90d03.y1 Schneider fetal brain 0000 | 2.29 | 3721 |
| 416820 | NM_000402 | Hs.80206 | glucose-6-phosphate dehydrogenase | 2.29 | 1029 4969 |
| 421535 | AB002359 | Hs.105478 | phosphoribosylformylglycinamidine syntha | 2.29 | 1535 5115 |
| 446567 | NM_007247 | Hs.15384 | AP1 gamma subunit binding protein 1 | 2.29 | 3764 5672 |
| 451134 | AA318315 | Hs.25999 | hypothetical protein FLJ22195 | 2.29 | 4196 |
| 441659 | BE564162 | Hs.250820 | hypothebcal protein FLJ14827 | 2.29 | 3366 |
| 434182 | W20309 | Hs.118520 | G-protein gamma-12 subunit | 2.29 | 2818 |
| 447118 | AB014599 | Hs.330988 | Homo sapiens, Similar to Bicaudal D (Dro | 2.29 | 3823 5682 |
| 443044 | N28522 | Hs.8935 | quinolinate phosphoribosyltransferase (n | 2.29 | 3489 |
| 405028 | | | C9001589: gi\|548751\|sp\|P36241\|RL19_DROME | 2.29 | |
| 418747 | AJ249977 | Hs.88049 | protein kinase, AMP-activated, gamma 3 n | 2.29 | 1235 5028 |
| 402189 | | | ENSP00000247423*: D.siglec precursor | 2.29 | |
| 408743 | AL110246 | Hs.47367 | KIAA1785 protein | 2.29 | 301 |
| 408697 | AW419069 | Hs.209670 | ESTs | 2.29 | 294 |
| 408249 | AW271838 | Hs.44038 | pellino (Drosophila) homolog 2 | 2.29 | 249 |
| 432279 | N95104 | Hs.274260 | ATP-binding cassette, sub-family C (CFTR | 2.28 | 2651 |
| 446229 | AI744964 | Hs.14449 | KIAA1609 protein | 2.28 | 3736 |
| 421828 | AW891965 | | histone deacetylase 3 | 2.28 | 1569 |
| 451351 | AW058261 | Hs.321435 | ESTs, Weakly similar to ALU1_HUMAN ALU S | 2.28 | 4214 |
| 412445 | X51362 | Hs.73893 | dopamine receptor D2 | 2.28 | 4879 632 |
| 425671 | AF193612 | Hs.159142 | lunatic fringe (Drosophila) homolog | 2.28 | 1984 5274 |
| 425360 | BE547704 | Hs.15276 | gb: 601076309F1 NIH_MGC_12 Homo sapiens c | 2.28 | 1953 |
| 454560 | AW807281 | | gb: MR4-ST0062-240300-003-g01 ST0062 Homo | 2.28 | 4490 |
| 430016 | NM_004736 | Hs.227656 | xenotropic and polytropic retrovirus rec | 2.28 | 2437 5432 |
| 457234 | AW968360 | Hs.14355 | Homo sapiens cDNA FLJ13207 fis, clone NT | 2.28 | 4584 |
| 458132 | AW247012 | Hs.103267 | hypothetical protein FLJ22548 similar to | 2.28 | 4612 |
| 432871 | NM_016142 | Hs.279617 | steroid dehydrogenase homolog | 2.28 | 2706 5517 |
| 409119 | AA531133 | Hs.4253 | hypothetical protein MGC2574 | 2.27 | 335 |
| 452700 | AI859390 | Hs.288940 | five-span transmembrane protein M83 | 2.27 | 4336 |
| 400414 | AF083118 | Hs.283968 | Homo sapiens CATX-2 mRNA, complete cds | 2.27 | 16 4688 |
| 401804 | | | C17000304*: gi\|9801259\|emb\|CAC03558.1\| (A | 2.27 | |
| 428599 | AB033078 | Hs.186613 | sphingosine-1-phosphate lyase 1 | 2.27 | 2276 5367 |
| 409465 | AW393810 | Hs.78054 | gb: QV4-TT0008-251099-016-e11 TT0008 Homo | 2.27 | 376 |
| 434067 | H18913 | Hs.124023 | Homo sapiens cDNA FLJ14218 fis, clone NT | 2.27 | 2812 |
| 447656 | NM_003726 | Hs.19126 | src kinase-associated phosphoprotein of | 2.27 | 3887 5695 |
| 448641 | R31845 | Hs.21666 | insulin-like 4 (placenta) | 2.27 | 3991 |
| 439442 | AA310162 | Hs.169248 | cytochrome c | 2.27 | 372 |
| 409213 | U61412 | Hs.51133 | PTK6 protein tyrosine kinase 6 | 2.27 | 352 4818 |
| 411942 | AW877015 | | gb: QV2-PT0010-250300-096-f12 PT0010 Homo | 2.27 | 588 |
| 415279 | F04237 | Hs.1447 | glial fibrillary acidic protein | 2.27 | 923 |
| 448667 | Z78394 | Hs.4896 | Homo sapiens cDNA: FLJ22046 fis, clone H | 2.27 | 3995 |
| 439714 | AW367812 | Hs.199961 | ESTs, Weakly similar to ALU7_HUMAN ALU S | 2.27 | 399 |
| 444984 | H15474 | Hs.132898 | fatty acid desaturase 1 | 2.27 | 3643 |
| 411737 | AW160339 | Hs.71791 | hypothetical protein | 2.27 | 573 |
| 428054 | AI948688 | Hs.266619 | ESTs | 2.26 | 2218 |
| 407844 | AW073716 | Hs.8037 | ESTs | 2.26 | 207 |
| 447484 | AA464839 | Hs.292566 | hypothetical protein FLJ14697 | 2.26 | 3866 |
| 442723 | AI804331 | Hs.99423 | ATP-dependent RNA helicase | 2.26 | 3463 |
| 433626 | AF078859 | Hs.86347 | hypothetical protein | 2.26 | 2773 5537 |
| 425960 | AW410646 | Hs.164649 | hypothetical protein DKFZp434H247 | 2.26 | 2014 |
| 456258 | AW976410 | Hs.289069 | Homo sapiens clone FLB3411 PRO0852 mRNA, | 2.26 | 4535 |
| 408482 | NM_000676 | Hs.45743 | adenosine A2b receptor | 2.26 | 270 4798 |
| 427752 | AA470687 | Hs.104772 | ESTs | 2.26 | 2194 |
| 444572 | R50145 | Hs.270549 | HZFw1 protein | 2.26 | 3610 |
| 422010 | AA302049 | Hs.31181 | Homo sapiens cDNA: FLJ23230 fis, clone C | 2.26 | 1593 |
| 433698 | H24201 | Hs.247423 | adducin 2 (beta) | 2.26 | 2781 |
| 416636 | N32536 | Hs.42645 | solute carrier family 16 (monocarboxylic | 2.26 | 1008 |
| 422248 | AL109695 | Hs.113657 | Homo sapiens mRNA full length insert cDN | 2.26 | 1620 |
| 431604 | AF175265 | Hs.264190 | vacuolar protein sorting 35 (yeast homol | 2.26 | 2573 5481 |
| 447211 | AL161961 | Hs.17767 | KIAA1554 protein | 2.25 | 3830 |
| 414906 | AA157911 | Hs.72200 | ESTs | 2.25 | 890 |
| 450746 | D82673 | Hs.278589 | general transcription factor II, i | 2.25 | 4158 |
| 412326 | R07566 | Hs.73817 | small inducible cytokine A3 (homologous | 2.25 | 624 |
| 422955 | AW967824 | Hs.324237 | ESTs | 2.25 | 1697 |
| 448918 | AB011152 | Hs.22572 | KIAA0580 protein | 2.25 | 4019 5716 |
| 402229 | | | mitochondrial ribosomal protein S2 | 2.25 | |
| 446550 | AW500453 | Hs.34455 | gb: UI-HF-BN0-akb-c-11-0-UI.r1 NIH_MGC_50 | 2.25 | 3760 |
| 425702 | N59555 | | gb: yv76f05.s1 Soares fetal liver spleen | 2.25 | 1991 |
| 416707 | H78163 | Hs.14005 | ESTs | 2.25 | 1015 |
| 450754 | AW204237 | | ESTs, Weakly similar to ALU1_HUMAN ALU S | 2.25 | 4162 |
| 428898 | AB033070 | Hs.194408 | KIAA1244 protein | 2.25 | 2316 5383 |
| 404877 | | | NM_005365: Homo sapiens melanoma antigen, | 2.25 | 4729 63 |
| 441926 | AI015051 | Hs.130953 | ESTs | 2.25 | 3379 |
| 424003 | BE274717 | Hs.137506 | Homo sapiens, clone IMAGE: 3605104, mRNA, | 2.25 | 1789 |
| 411782 | H30518 | | gb: yp41b03.s1 Soares retina N2b5HR Homo | 2.25 | 578 |
| 443741 | AW451759 | Hs.145420 | ESTs | 2.25 | 3547 |
| 404341 | | | Target Exon | 2.25 | |
| 438632 | AI910521 | Hs.123493 | ESTs | 2.25 | 3155 |
| 442481 | N99828 | | gb: za32c04.r1 Soares fetal liver spleen | 2.25 | 3434 |
| 401160 | | | Target Exon | 2.25 | |
| 413940 | AI633205 | Hs.159914 | ESTs, Weakly similar to I78885 serine/th | 2.25 | 766 |
| 401925 | | | sialyltransferase 1 (beta-galactoside al | 2.25 | |
| 410401 | AW673335 | Hs.259641 | ESTs | 2.25 | 473 |
| 418764 | N30531 | Hs.42215 | protein phosphatase 1, regulatory subuni | 2.25 | 1238 |
| 407687 | AK002011 | Hs.37558 | hypothetical protein FLJ11149 | 2.25 | 180 4778 |
| 449065 | AI627393 | Hs.258998 | ESTs, Weakly similar to high mobility gr | 2.25 | 4032 |
| 452243 | AL355715 | Hs.28555 | programmed cell death 9 (PDCD9) | 2.25 | 4287 5756 |
| 417124 | BE122762 | Hs.25338 | ESTs | 2.25 | 1063 |
| 432821 | BE170702 | Hs.279005 | solute carrier family 21 (organic anion | 2.25 | 2701 |
| 425416 | AK000909 | Hs.157103 | hypothetical protein FLJ12644 | 2.25 | 1960 |
| 446182 | AV656995 | Hs.269904 | ESTs | 2.25 | 3734 |
| 428180 | AI129767 | Hs.182874 | guanine nucleotide binding protein (G pr | 2.25 | 2226 |
| 422285 | AI803103 | | gb: tc14e06.x1 Soares_NhHMPu_S1 Homo sapi | 2.25 | 1627 |
| 444326 | AI939357 | | ESTs | 2.25 | 3589 |
| 446147 | AL133064 | Hs.14051 | Homo sapiens mRNA; cDNA DKFZp434A2417 (f | 2.25 | 3727 5665 |
| 432808 | NM_015985 | Hs.278973 | angiopoietin-3 | 2.25 | 2700 5514 |
| 434639 | R83159 | Hs.33366 | EST | 2.25 | 2858 |
| 442430 | R89164 | | double ring-finger protein, Dorfin | 2.25 | 3428 |
| 406374 | | | C16001364: gi\|11067373\|ref\|NP_067689.1\| C | 2.25 | |
| 428405 | Y00762 | Hs.2266 | cholinergic receptor, nicotinic, alpha p | 2.25 | 2250 5357 |
| 428466 | AF151063 | Hs.184456 | hypothetical protein | 2.25 | 2261 5360 |
| 417046 | AA192639 | | gb: zq01h09.r1 Stratagene muscle 937209 H | 2.25 | 1057 |
| 439239 | AI031540 | Hs.235331 | ESTs | 2.25 | 3194 |
| 431820 | AW410408 | Hs.271167 | L-pipecolic acid oxidase | 2.25 | 2602 |
| 413273 | U75679 | Hs.75257 | stem-loop (histone) binding protein | 2.25 | 4896 704 |
| 400234 | | | NM_005336: Homo sapiens high density lipo | 2.25 | 4 4683 |
| 413691 | AB023173 | Hs.75478 | ATPase, Class VI, type 11B | 2.25 | 4905 748 |
| 436856 | AI469355 | Hs.127310 | ESTs | 2.25 | 3011 |
| 424685 | W21223 | Hs.151734 | nuclear transport factor 2 (placental pr | 2.25 | 1872 |
| 435438 | H84421 | Hs.4890 | ubiquitin-conjugating enzyme E2E 3 (Homo | 2.25 | 2915 |
| 440043 | BE277457 | Hs.30661 | hypothetical protein MGC4606 | 2.25 | 3256 |
| 453575 | AB023211 | Hs.33455 | peptidyl arginine deiminase, type II | 2.24 | 4419 5780 |
| 424689 | D43947 | Hs.151761 | KIAA0100 gene product | 2.24 | 1874 5226 |
| 428206 | AB020643 | Hs.183006 | KIAA0836 protein | 2.24 | 2229 5351 |
| 417207 | N92226 | Hs.338218 | ESTs | 2.24 | 1072 |
| 430979 | AI479755 | Hs.129010 | ESTs | 2.24 | 2523 |
| 402530 | | | Target Exon | 2.24 | |
| 427691 | AW194426 | Hs.20726 | UDP-N-acetyl-alpha-D-galactosamine: polyp | 2.24 | 2181 |
| 434206 | AW136973 | | ESTs, Weakly similar to S69890 mitogen i | 2.24 | 2821 |
| 452017 | AF109302 | Hs.27495 | prostate cancer associated protein 7 | 2.24 | 4263 |
| 422127 | AW504286 | Hs.112049 | SET binding factor 1 | 2.24 | 1606 |
| 408949 | AF189011 | Hs.49163 | putative ribonuclease III | 2.24 | 319 4809 |
| 441085 | AW136551 | Hs.181245 | Homo sapiens cDNA FLJ12532 fis, clone NT | 2.24 | 3331 |
| 425140 | AB014567 | Hs.154740 | TBP-interacting protein | 2.24 | 1926 5247 |
| 423840 | AA332434 | Hs.72465 | ESTs, Weakly similar to non-lens beta ga | 2.24 | 1779 |
| 420428 | AA262050 | Hs.156148 | hypothetical protein FLJ13231 | 2.24 | 1420 |
| 448497 | BE613269 | Hs.21893 | hypothetical protein DKFZp761N0624 | 2.24 | 3977 |
| 411400 | AA311919 | Hs.69851 | nucleolar protein family A, member 1 (H/ | 2.23 | 551 |
| 431683 | AK001749 | Hs.267604 | hypothetical protein FLJ10450 | 2.23 | 2583 5486 |
| 421222 | AA306049 | Hs.102669 | DKFZP434O125 protein | 2.23 | 1491 |
| 425118 | AU076611 | Hs.154672 | methylene tetrahydrofolate dehydrogenase | 2.23 | 1923 |
| 447948 | AI620923 | Hs.46679 | hypothetical protein FLJ20739 | 2.23 | 3924 |
| 403332 | | | Target Exon | 2.23 | |
| 431123 | X77723 | Hs.326056 | rabaptin-5 | 2.23 | 2531 |
| 421247 | BE391727 | Hs.102910 | general transcription factor IIH, polype | 2.23 | 1495 |
| 421568 | W85858 | Hs.99804 | ESTs | 2.23 | 1539 |
| 458376 | AB023179 | Hs.9059 | KIAA0962 protein | 2.23 | 4622 5816 |
| 452388 | BE019696 | Hs.29287 | retinoblastoma-binding protein 8 | 2.23 | 4302 |
| 401952 | | | Target Exon | 2.23 | |
| 402819 | | | ENSP00000235150: DJ1174N9.1 (novel protei | 2.23 | |
| 437582 | AW673321 | Hs.46903 | hypothetical protein FLJ12838 | 2.23 | 3071 |
| 439180 | AI393742 | Hs.199067 | v-erb-b2 avian erythroblastic leukemia v | 2.22 | 3190 |
| 409960 | BE261944 | | hexokinase 1 | 2.22 | 422 |
| 451617 | C01056 | | hypothetical protein FLJ12577 | 2.22 | 4233 |
| 435956 | AF269255 | Hs.22604 | lysosomal apyrase-like protein 1 | 2.22 | 2954 5573 |
| 431863 | AA188185 | Hs.289043 | spindlin | 2.22 | 2609 |
| 409456 | U34962 | Hs.54473 | cardiac-specific homeo box | 2.22 | 374 4825 |
| 425354 | U62027 | Hs.155935 | complement component 3a receptor 1 | 2.22 | 1952 5257 |
| 445664 | AW968638 | Hs.237691 | ESTs, Weakly similar to KIAA0601 protein | 2.22 | 3692 |
| 453915 | AA588721 | Hs.286218 | ribosomal protein L44 | 2.22 | 4451 |
| 431896 | AW297844 | Hs.101428 | ESTs | 2.22 | 2613 |
| 429377 | AA813192 | Hs.200596 | KIAA0547 gene product | 2.22 | 2362 |
| 409189 | AA125984 | | gb: zn27h06.r1 Stratagene neuroepithelium | 2.22 | 348 |
| 452488 | N74921 | Hs.184389 | ESTs | 2.22 | 4318 |
| 445356 | AW304777 | Hs.249690 | ESTs | 2.22 | 3672 |
| 402014 | | | Target Exon | 2.22 | |
| 420014 | AI248571 | Hs.13913 | KIAA1577 protein | 2.22 | 1373 |
| 455618 | BE155563 | | gb: PM4-HT0352-171199-001-C05 HT0352 Homo | 2.21 | 4516 |
| 437063 | AA351109 | | Tax1 (human T-cell leukemia virus type I | 2.21 | 3033 |
| 419508 | AW997938 | Hs.90786 | ATP-binding cassette, sub-family C (CFTR | 2.21 | 1323 |
| 409185 | AW961601 | Hs.252406 | hypothetical protein FLJ12296 similar to | 2.21 | 346 |
| 456999 | AA319798 | Hs.298581 | eukaryotic translation elongation factor | 2.21 | 4573 |
| 400203 | | | Eos Control | 2.21 | |
| 412490 | AW803564 | Hs.288850 | Homo sapiens cDNA: FLJ22528 fis, clone H | 2.21 | 637 |
| 434878 | AW975086 | | gb: EST387192 MAGE resequences, MAGN Homo | 2.21 | 2878 |
| 429898 | AW117322 | Hs.42366 | ESTs | 2.21 | 2423 |
| 444784 | D12485 | Hs.11951 | ectonucleotide pyrophosphatase/phosphodi | 2.21 | 3629 5646 |
| 447197 | R36075 | | gb: yh88b01.s1 Soares placenta Nb2HP Homo | 2.21 | 3828 |
| 417691 | AU076610 | Hs.82399 | low density lipoprotein receptor defect | 2.21 | 1112 |
| 449949 | AI675753 | Hs.186530 | ESTs, Weakly similar to S65657 alpha-1C- | 2.21 | 4092 |
| 410553 | AW016824 | Hs.272068 | hypothetical protein MGC14128 | 2.21 | 491 |
| 421551 | AF063539 | Hs.97300 | ESTs | 2.21 | 1537 |
| 414600 | NM_005647 | Hs.76536 | transducin (beta)-like 1 | 2.21 | 4921 852 |
| 428726 | AA432195 | Hs.98694 | ESTs | 2.20 | 2287 |
| 452753 | AA028049 | Hs.277728 | SEC14 (S. cerevisiae)-like 2 | 2.20 | 4342 |
| 434916 | AF161383 | Hs.284207 | Homo sapiens, Similar to RIKEN cDNA 1110 | 2.20 | 2879 5558 |
| 408113 | T82427 | Hs.194101 | Homo sapiens cDNA: FLJ20869 fis, clone A | 2.20 | 235 |
| 428385 | AF112213 | Hs.184062 | putative Rab5-interacting protein | 2.20 | 2247 5356 |
| 459376 | BE258770 | | Homo sapiens, clone IMAGE: 3344506, mRNA, | 2.20 | 4667 |
| 455475 | AW948126 | | gb: RC0-MT0013-280300-031-a12 MT0013 Homo | 2.20 | 4510 |
| 403549 | | | ENSP00000187471: HSNFRK, | 2.20 | |
| 434356 | AW467161 | Hs.78563 | ubiquitin-conjugating enzyme E2G 1 (Homo | 2.20 | 2832 |
| 445292 | AV653264 | Hs.13982 | Homo sapiens cDNA FLJ14666 fis, clone NT | 2.20 | 3666 |
| 403481 | | | Target Exon | 2.20 | |
| 410101 | AI338045 | Hs.203559 | hypothetical protein FLJ12701 | 2.20 | 445 |
| 401438 | | | ENSP00000238580*: SIMILARITY IS TO THE EN | 2.20 | |
| 421642 | AF172066 | Hs.106346 | retinoic acid repressible protein | 2.20 | 1548 5118 |
| 403429 | | | C3000329*: gi\|8922921\|ref\|NP_060821.1\| hy | 2.20 | |
| 440129 | AA865818 | | ESTs, Weakly similar to S71886 Ste20-lik | 2.20 | 3266 |
| 414571 | BE410746 | Hs.22868 | protein tyrosine phosphatase, non-recept | 2.20 | 846 |
| 451859 | H44491 | Hs.252938 | ESTs, Weakly similar to ALU1_HUMAN ALU S | 2.20 | 4253 |
| 410859 | AW807604 | | gb: MR4-ST0098-120100-001-b02 ST0098 Homo | 2.20 | 519 |
| 403154 | | | NM_022780*: Homo sapiens hypothetical pro | 2.20 | 43 4712 |
| 447054 | AW086454 | Hs.169248 | ESTs | 2.20 | 3815 |
| 443108 | W86975 | | ESTs | 2.20 | 3497 |
| 450058 | AW452752 | Hs.256034 | ESTs | 2.20 | 4101 |
| 410434 | AF051152 | Hs.63668 | toll-like receptor 2 | 2.20 | 478 4847 |
| 411436 | AW846433 | | gb: QV0-CT0179-070300-143-b02 CT0179 Homo | 2.20 | 556 |
| 414898 | AA157726 | Hs.264330 | N-acylsphingosine amidohydrolase (acid c | 2.20 | 889 |
| 448501 | AA332316 | | hypothetical protein FLJ13159 | 2.20 | 3978 |
| 457378 | AW972118 | Hs.100002 | HSPC162 protein | 2.20 | 4590 |
| 422890 | Z43784 | | ankyrin 3, node of Ranvier (ankyrin G) | 2.20 | 1690 |
| 438814 | AA826278 | | ESTs | 2.20 | 3167 |
| 425810 | AI923627 | Hs.31903 | ESTs | 2.20 | 1998 |
| 436683 | AW991278 | Hs.57787 | ESTs | 2.20 | 3003 |
| 410465 | AW963279 | Hs.123373 | ESTs, Weakly similar to ALU1_HUMAN ALU S | 2.20 | 481 |
| 433597 | AA708205 | Hs.100343 | ESTs | 2.20 | 2771 |
| 437838 | AI307229 | | ESTs | 2.20 | 3097 |
| 403858 | | | Target Exon | 2.20 | |
| 445325 | AF052115 | Hs.12514 | Homo sapiens clone 23688 mRNA sequence | 2.20 | 3668 |
| 450750 | H83398 | Hs.40489 | ESTs | 2.20 | 4161 |
| 417173 | U61397 | Hs.81424 | ubiquitin-like 1 (sentrin) | 2.20 | 1068 4979 |
| 437587 | AI591222 | Hs.72325 | Human DNA sequence from clone RP1-187J11 | 2.20 | 3072 |
| 423020 | AA383092 | Hs.1608 | replication protein A3 (14 kD) | 2.20 | 1711 |
| 429904 | AL080077 | Hs.225997 | Homo sapiens mRNA; cDNA DKFZp564C0962 (f | 2.20 | 2426 |
| 421387 | AF059566 | Hs.103983 | solute carrier family 5 (sodium iodide s | 2.20 | 1516 5105 |
| 429626 | U36787 | Hs.211571 | holocytochrome c synthase (cytochrome c | 2.20 | 2399 5418 |
| 411911 | AW875951 | | gb: CM1-PT0013-131299-067-f09 PT0013 Homo | 2.20 | 586 |
| 438093 | BE206885 | Hs.6076 | COP9 (constitutive photomorphogenic, Ara | 2.20 | 3117 |
| 432262 | AW197269 | Hs.127240 | hypothetical protein FLJ10211 | 2.20 | 2649 |
| 414178 | AW957372 | Hs.46791 | ESTs, Weakly similar to I38022 hypotheti | 2.19 | 797 |
| 424766 | BE388855 | Hs.152978 | proteaseome (prosome, macropain) 28 subu | 2.19 | 1884 |
| 455299 | AW891612 | | gb: CM3-NT0089-040500-174-a04 NT0089 Homo | 2.19 | 4506 |
| 422416 | BE019557 | Hs.11900 | hypothetical protein FLJ14972 | 2.19 | 1642 |
| 428758 | AA433988 | Hs.98502 | CA125 antigen; mucin 16 | 2.19 | 2292 |
| 410600 | AW575742 | | ESTs, Moderately similar to S65657 alpha | 2.19 | 496 |
| 400540 | | | Target Exon | 2.19 | |
| 445176 | AI878907 | Hs.12379 | ELAV (embryonic lethal, abnormal vision, | 2.19 | 3659 |
| 445350 | AF052112 | Hs.12540 | lysophospholipase I | 2.19 | 3671 |
| 420718 | NM_002301 | Hs.99881 | lactate dehydrogenase C | 2.19 | 1445 5084 |
| 436605 | AI187742 | Hs.125562 | ESTs | 2.19 | 2996 |
| 421353 | AW292857 | Hs.255130 | ESTs | 2.19 | 1511 |
| 435080 | AI831760 | Hs.155111 | hypothetical protein FLJ14428 | 2.19 | 2893 |
| 419252 | AW138434 | Hs.129805 | ESTs | 2.19 | 1293 |
| 419591 | AF090900 | Hs.91393 | Homo sapiens cDNA: FLJ21887 fis, clone H | 2.19 | 1338 5054 |
| 410687 | U24389 | Hs.65436 | lysyl oxidase-like 1 | 2.19 | 4853 507 |
| 446849 | AU076617 | Hs.16251 | cleavage and polyadenylation specific fa | 2.19 | 3795 |
| 414740 | R61532 | Hs.87016 | hypothetical protein FLJ22938 | 2.19 | 871 |
| 432707 | AW604865 | Hs.158515 | hypothetical protein MGC13038 | 2.19 | 2692 |
| 448362 | AA641767 | Hs.21015 | hypothetical protein DKFZp564L0864 simil | 2.19 | 3960 |
| 430637 | BE160081 | Hs.256290 | S100 calcium-binding protein A11 (calgiz | 2.19 | 2501 |
| 432348 | AA534353 | Hs.194081 | ESTs, Weakly similar to I38022 hypotheti | 2.19 | 2657 |
| 419444 | NM_002496 | Hs.90443 | Target CAT | 2.19 | 1314 5048 |
| 401403 | | | Target Exon | 2.19 | |
| 432621 | AI298501 | Hs.21192 | ESTs, Weakly similar to T46428 hypotheti | 2.19 | 2685 |
| 428281 | AA194554 | Hs.183434 | ATPase, H transporting, lysosomal (vacuo | 2.18 | 2236 |
| 421525 | AW977559 | Hs.4193 | DKFZP586O1624 protein | 2.18 | 1533 |
| 433139 | AB029826 | Hs.47649 | methylcrotonoyl-Coenzyme A carboxylase 1 | 2.18 | 2738 5529 |
| 444298 | Z17870 | | gb: HSDHII020 Stratagene cDNA library Hum | 2.18 | 3586 |
| 428074 | BE387770 | Hs.182378 | colony stimulating factor 2 receptor, al | 2.18 | 2219 |
| 406423 | | | C19000229*: gi\|6753826\|ref\|NP_034311.1\|f | 2.18 | |
| 442911 | AI023895 | Hs.190587 | ESTs | 2.18 | 3479 |
| 425524 | AB007866 | Hs.158249 | KIAA0406 gene product | 2.18 | 1974 5269 |
| 413063 | AL035737 | Hs.75184 | chitinase 3-like 1 (cartilage glycoprote | 2.18 | 692 |
| 450998 | BE387614 | Hs.25797 | splicing factor 3b, subunit 4, 49 kD | 2.18 | 4181 |
| 440035 | BE561589 | | hypothetical protein FLJ21839 | 2.18 | 3254 |
| 451025 | AW028689 | Hs.301985 | ESTs | 2.18 | 4182 |
| 449008 | AW578003 | Hs.22826 | tropomodulin 3 (ubiquitous) | 2.18 | 4026 |
| 426174 | AA547959 | Hs.115838 | Homo sapiens similar to Echinoidin (LOC1 | 2.18 | 2036 |
| 416322 | BE019494 | Hs.79217 | pyrroline-5-carboxylate reductase 1 | 2.17 | 986 |
| 401711 | | | C16000267: gi\|6330617\|dbj\|BAA86537.1\|(AB | 2.17 | |
| 446989 | AK001898 | Hs.16740 | hypothetical protein FJ11036 | 2.17 | 3808 5679 |
| 416375 | H95567 | Hs.124700 | ESTs | 2.17 | 991 |
| 453985 | N44545 | Hs.251865 | ESTs | 2.17 | 4457 |
| 402942 | | | Target Exon | 2.17 | |
| 400120 | | | Eos Control | 2.17 | |
| 401138 | | | Target Exon | 2.17 | |
| 414108 | AI267592 | Hs.75761 | SFRS protein kinase 1 | 2.17 | 788 |
| 427715 | BE245274 | Hs.180428 | KIAA1181 protein | 2.17 | 2188 |
| 448407 | AI498957 | Hs.170861 | ESTs, Weakly similar to Z195_HUMAN ZINC | 2.17 | 3965 |
| 448745 | H51548 | Hs.21899 | solute carrier family 35 (UDP-galactose | 2.17 | 4001 |
| 436265 | AA731331 | Hs.190668 | ESTs | 2.17 | 2972 |
| 406237 | | | Target Exon | 2.17 | |
| 402322 | | | Target Exon | 2.17 | |
| 416812 | H91010 | Hs.44940 | ESTs | 2.17 | 1025 |
| 429462 | AI890356 | | Homo sapiens, clone IMAGE: 3536432, mRNA, | 2.17 | 2373 |
| 438098 | AI076370 | Hs.134037 | ESTs | 2.17 | 3118 |
| 442134 | BE552359 | Hs.225092 | ESTs | 2.17 | 3400 |
| 445922 | AI337316 | Hs.147998 | ESTs | 2.17 | 3713 |
| 419590 | AF005043 | Hs.91390 | poly (ADP-ribose) glycohydrolase | 2.17 | 1337 5053 |
| 446290 | AW769683 | Hs.6734 | ESTs, Weakly similar to S26650 DNA-bindi | 2.17 | 3742 |
| 413313 | NM_002047 | Hs.283108 | glycyl-tRNA synthetase | 2.17 | 4897 709 |
| 404661 | | | C9000306*: gi\|12737280\|ref\|XP_006682.2\|k | 2.17 | |
| 448854 | AW245617 | Hs.77703 | hypothetical protein FLJ11506 | 2.16 | 4014 |
| 414169 | AA136169 | Hs.149335 | ESTs | 2.16 | 796 |
| 414161 | AA136106 | Hs.184852 | KIAA1553 protein | 2.16 | 794 |
| 445070 | NM_000677 | Hs.258 | adenosine A3 receptor | 2.16 | 3648 5650 |
| 446830 | BE179030 | | Human DNA sequence from clone RP5-1174N9 | 2.16 | 3793 |
| 414636 | AL120259 | Hs.76691 | stannin | 2.16 | 856 |
| 432626 | AA471098 | Hs.278544 | acetyl-Coenzyme A acetyltransferase 2 (a | 2.16 | 2687 |
| 428582 | BE336699 | Hs.185055 | BENE protein | 2.16 | 2272 |
| 453710 | AL119136 | Hs.236131 | homeodomain-interacting protein kinase 2 | 2.16 | 4425 |
| 438510 | AL080220 | Hs.6285 | DKFZP586P0123 protein | 2.16 | 3143 5595 |
| 454034 | NM_000691 | Hs.575 | aldehyde dehydrogenase 3 family, member | 2.16 | 4462 5792 |
| 451991 | AA768353 | Hs.163709 | ESTs, Moderately similar to I38022 hypot | 2.16 | 4261 |
| 415282 | R44308 | Hs.242302 | ESTs | 2.16 | 924 |
| 415443 | T07353 | Hs.7948 | ESTs | 2.16 | 931 |
| 409267 | NM_012453 | Hs.52515 | transducin (beta)-like 2 | 2.16 | 357 4821 |
| 440300 | N39760 | Hs.8859 | Homo sapiens, Similar to RIKEN cDNA 5830 | 2.16 | 3279 |
| 440494 | BE618768 | Hs.7232 | acetyl-Coenzyme A carboxylase alpha | 2.16 | 3293 |
| 435550 | AI224456 | Hs.324507 | H. sapiens polyA site DNA | 2.16 | 2927 |
| 415914 | AA306033 | Hs.78915 | GA-binding protein transcription factor, | 2.16 | 960 |
| 436700 | AI693690 | Hs.301406 | hypothetical protein PP3501 | 2.15 | 3005 |
| 454150 | AA131893 | Hs.154088 | hypothetical protein FLJ22756 | 2.15 | 4470 |
| 423540 | AI038192 | Hs.95361 | EGF-like repeats and discoidin I-like do | 2.15 | 1755 |
| 400084 | | | Eos Control | 2.15 | |
| 453129 | R35265 | Hs.237946 | ESTs, Weakly similar to TRHY_HUMAN TRICH | 2.15 | 4377 |
| 421861 | S78798 | Hs.108966 | phosphatidylinositol-4-phosphate 5-kinas | 2.15 | 1572 5126 |
| 421506 | BE302796 | Hs.105097 | thymidine kinase 1, soluble | 2.15 | 1528 |
| 405673 | | | NM_022775: Homo sapiens hypothetical prot | 2.15 | 4738 72 |
| 413774 | AA131782 | Hs.182314 | ESTs | 2.15 | 753 |
| 452177 | AI863447 | Hs.268180 | gb: tz48f01.x1 NCI_CGAP_Bm52 Homo sapien | 2.15 | 4279 |
| 450166 | AA429504 | Hs.8765 | ESTs | 2.15 | 4108 |
| 425094 | AI955956 | Hs.21417 | ESTs | 2.15 | 1919 |
| 453265 | U61232 | Hs.343564 | tubulin-specific chaperone e | 2.15 | 4389 5773 |
| 445255 | NM_014841 | Hs.12477 | synaptosomal-associated protein, 91 kDa | 2.15 | 3663 5653 |
| 400125 | | | Eos Control | 2.15 | |
| 456806 | AI222298 | Hs.140720 | GSK-3 binding protein FRAT2 | 2.15 | 4561 |
| 447497 | AW167254 | Hs.205722 | ESTs | 2.15 | 3869 |
| 405869 | | | Target Exon | 2.15 | |
| 406261 | | | Target Exon | 2.15 | |
| 413286 | AA127984 | Hs.222024 | transcription factor BMAL2 | 2.15 | 708 |
| 446457 | AI300580 | | ESTs, Moderately similar to ALU1_HUMAN A | 2.15 | 3752 |
| 437054 | AA743376 | Hs.120592 | ESTs | 2.15 | 3032 |
| 401708 | | | Target Exon | 2.15 | |
| 417185 | NM_002484 | Hs.81469 | nucleotide binding protein 1 (E. coli Min | 2.15 | 1070 4980 |
| 402704 | | | C1001099*: gi\|6005896\|ref\|NP_009101.1\| te | 2.15 | |
| 454923 | AW897236 | | gb: CM0-NN0057-150400-335-c06 NN0057 Homo | 2.15 | 4498 |
| 431231 | AA653552 | Hs.116532 | ESTs | 2.15 | 2542 |
| 447229 | BE617135 | Hs.22612 | hypothetical protein DKFZp566D1346 | 2.15 | 3832 |
| 416554 | H72721 | Hs.203509 | ESTs, Weakly similar to I38022 hypotheti | 2.15 | 1002 |
| 431316 | AA502663 | Hs.145037 | ESTs | 2.15 | 2548 |
| 414727 | BE466904 | Hs.190162 | gb: hz28f03.x1 NCI_CGAP_GC6 Homo sapiens | 2.15 | 870 |
| 410307 | AF022913 | Hs.62187 | phosphatidylinositol glycan, class K | 2.15 | 464 4844 |
| 409358 | AI609021 | Hs.292725 | ESTs, Weakly similar to T18818 hypotheti | 2.15 | 363 |
| 442611 | BE077155 | Hs.177537 | hypothetical protein DKFZp761B1514 | 2.15 | 3453 |
| 408653 | AW410189 | Hs.98074 | itchy (mouse homolog) E3 ubiquitin prote | 2.15 | 287 |
| 418849 | AW474547 | Hs.53565 | Homo sapiens PIG-M mRNA for mannosyltran | 2.15 | 1249 |
| 418647 | AA226198 | | gb: nc26a07.s1 NCI_CGAP_Pr1 Homo sapiens | 2.15 | 1218 |
| 456516 | BE172704 | Hs.222746 | KIAA1610 protein | 2.15 | 4548 |
| 422330 | D30783 | Hs.115263 | epiregulin | 2.15 | 1632 5147 |
| 418437 | AA771738 | Hs.348000 | ESTs, Moderately similar to ALU5_HUMAN A | 2.15 | 1201 |
| 457100 | AA417878 | Hs.48401 | ESTs, Moderately similar to ALU8_HUMAN A | 2.15 | 4578 |
| 445890 | AF055019 | Hs.21906 | Homo sapiens clone 24670 mRNA sequence | 2.15 | 3708 |
| 447957 | NM_014821 | Hs.20126 | KIAA0317 gene product | 2.15 | 3925 5703 |
| 442578 | AK001643 | Hs.8395 | hypothetical protein FLJ10781 | 2.15 | 3448 5622 |
| 400987 | | | C11000939: gi\|11464993\|ref\|NP_065260.1\| g | 2.15 | |
| 455642 | BE063965 | | gb: QV3-BT0296-140200-085-h01 BT0296 Homo | 2.15 | 4517 |
| 484029 | | | NM_018936*: Homo sapiens protocadherin be | 2.15 | 4718 50 |
| 452817 | AA322859 | Hs.284275 | Homo sapiens PAK2 mRNA, complete cds | 2.15 | 4347 |
| 423165 | AI937547 | Hs.124915 | hypothetical protein MGC2601 | 2.15 | 1722 |
| 442327 | AA991745 | Hs.42522 | ESTs | 2.15 | 3418 |
| 457146 | BE271371 | | biphenyl hydrolase-like (serine hydrolas | 2.14 | 4581 |
| 429362 | T25833 | Hs.200478 | ubiquitin-conjugating enzyme E2M (homolo | 2.14 | 2360 |
| 448748 | AI567442 | Hs.321666 | ESTs, Weakly similar to ALUF_HUMAN !!!! | 2.14 | 4002 |
| 406596 | | | C15000556*: gi\|11862941\|dbj\|BAB19279.1\|) | 2.14 | |
| 440388 | AI693520 | Hs.223000 | ESTs | 2.14 | 3286 |
| 436314 | AI983409 | | ESTs | 2.14 | 2979 |
| 447433 | AA651869 | Hs.5320 | hypothetical protein | 2.14 | 3860 |
| 433441 | R37094 | Hs.13742 | ESTs | 2.14 | 2763 |
| 458497 | AI161428 | Hs.75916 | splicing factor 3b, subunit 2, 145 kD | 2.14 | 4625 |
| 429938 | BE296804 | Hs.226377 | phosphate cytidylyltransferase 2, ethano | 2.14 | 2429 |
| 444859 | AW449137 | Hs.157487 | ESTs | 2.14 | 3634 |
| 421628 | AL121317 | Hs.106210 | hypothetical protein FLJ10813 | 2.14 | 1547 |
| 450832 | AW970602 | Hs.105421 | ESTs | 2.14 | 4171 |
| 451622 | AW139587 | Hs.30579 | Homo sapiens cDNA: FLJ23070 fis, clone L | 2.14 | 4236 |
| 409125 | R17268 | Hs.343567 | axonal transport of synaptic vesicles | 2.14 | 336 |
| 407347 | AA829847 | | gb: od40d07.s1 NCI_CGAP_GCB1 Homo sapiens | 2.14 | 154 |
| 405850 | | | Target Exon | 2.14 | |
| 437879 | BE262082 | Hs.5894 | hypothetical protein FLJ10305 | 2.14 | 3102 |
| 454515 | AW803201 | | intron of: trichorhinophalangeal syndro | 2.14 | 4487 |
| 428717 | T78001 | Hs.133546 | hypothetical protein FLJ21120 | 2.14 | 2285 |
| 410668 | BE379794 | Hs.159651 | tumor necrosis factor receptor superfami | 2.14 | 503 |
| 437673 | AW665665 | Hs.153034 | ESTs | 2.14 | 3081 |
| 440049 | R06699 | Hs.19769 | hypothetical protein MGC4174 | 2.14 | 3257 |
| 434766 | AA742222 | Hs.120634 | ESTs | 2.14 | 2865 |
| 458882 | R34993 | Hs.226666 | ESTs, Moderately similar to I54374 gene | 2.14 | 4643 |
| 432593 | AW301003 | Hs.51483 | ESTs, Weakly similar to hypothetical pro | 2.14 | 2682 |
| 458744 | AW445183 | | ESTs | 2.13 | 4634 |
| 419557 | N94706 | | Homo sapiens cDNA FLJ14028 fis, clone HE | 2.13 | 1333 |
| 413771 | AA810047 | Hs.4112 | acetyl-Coencyme A acetyltransferase 2 (a | 2.13 | 752 |
| 452679 | Z42387 | Hs.83883 | transmembrane, prostate androgen induced | 2.13 | 4333 |
| 444773 | BE156256 | Hs.11923 | hypothetical protein | 2.13 | 3627 |
| 419409 | AW297831 | Hs.143792 | hypothetical protein MGC2656 | 2.13 | 1312 |
| 415989 | AI267700 | | ESTs | 2.13 | 963 |
| 413283 | R78669 | Hs.23756 | hypothetical protein similar to swine ac | 2.13 | 707 |
| 448648 | BE614345 | Hs.297214 | ESTs, Weakly similar to ALU7_HUMAN ALU S | 2.13 | 3992 |
| 425003 | AF119046 | Hs.154149 | apurinic/apyrimidinic endonuclease(APEX | 2.13 | 1909 5242 |
| 447460 | AW872495 | | hypothetical protein FLJ12439 | 2.13 | 3863 |
| 413219 | AA878200 | Hs.118727 | Homo sapiens cDNA FLJ13692 fis, clone PL | 2.13 | 701 |
| 427550 | BE242818 | Hs.311609 | nuclear RNA helicase, DECD variant of DE | 2.13 | 2165 |
| 446627 | AI973016 | Hs.15725 | hypothetical protein SBBI48 | 2.13 | 3772 |
| 421190 | U95031 | Hs.102482 | mucin 5, subtype B, tracheobronchial | 2.13 | 1488 5096 |
| 419764 | BE262524 | Hs.93183 | vasodilator-stimulated phosphoprotein | 2.13 | 1360 |
| 432170 | T56887 | Hs.18282 | KIAA1134 protein | 2.13 | 2638 |
| 436905 | N31273 | Hs.42380 | ESTs | 2.13 | 3020 |
| 419674 | AK000170 | Hs.92254 | synaptotagmin-like 2 | 2.13 | 1347 5055 |
| 419125 | AA642452 | Hs.130881 | B-cell CLL/lymphoma 11A (zinc finger pro | 2.13 | 1279 |
| 435858 | AF254260 | Hs.283009 | tuftelin 1 | 2.13 | 2950 5572 |
| 438614 | AB037726 | Hs.288348 | KIAA1305 protein | 2.13 | 3154 5597 |
| 448889 | BE140902 | | gb: IL1-HT0028-240699-001-C11 HT0028 Homo | 2.13 | 4018 |
| 439117 | AF085975 | | gb: Homo sapiens full length insert cDNA | 2.13 | 3187 |
| 404745 | | | Target Exon | 2.13 | |
| 453205 | W92881 | Hs.117235 | ESTs | 2.13 | 4386 |
| 418340 | NM_013286 | Hs.84162 | chromosome 3p21.1 gene sequence | 2.13 | 1190 5011 |
| 413405 | AW022253 | Hs.215976 | ESTs | 2.13 | 716 |
| 418429 | AB010427 | Hs.85100 | WD repeat domain 1 | 2.13 | 1200 5016 |
| 441134 | W29092 | Hs.346950 | cellular retinoic acid-binding protein 1 | 2.13 | 3335 |
| 437277 | AA748016 | Hs.123370 | ESTs | 2.12 | 3055 |
| 409310 | R88721 | Hs.164584 | ESTs | 2.12 | 360 |
| 435905 | AW997484 | Hs.5003 | KIAA0456 protein | 2.12 | 2951 |
| 401908 | | | C17000154: gi\|12003980\|gb\|AAG43830.1\|AF21 | 2.12 | |
| 419152 | L12711 | Hs.89643 | transketolase (Wernicke-Korsakoff syndro | 2.12 | 1283 5040 |
| 418900 | BE207357 | Hs.3454 | KIAA1821 protein | 2.12 | 1258 |
| 405365 | | | CX001212*: gi\|7861932\|gb\|AAF70445.1\| (AF2 | 2.12 | |
| 413199 | M62843 | Hs.75236 | ELAV (embryonic lethal, abnormal vision, | 2.12 | 4895 699 |
| 427300 | AA400518 | Hs.169395 | hypothetical protein FLJ12015 | 2.12 | 2140 |
| 421254 | AK001724 | Hs.102950 | coat protein gamma-cop | 2.12 | 1496 |
| 424411 | NM_005209 | Hs.146549 | crystallin, beta A2 | 2.12 | 1841 5211 |
| 421458 | NM_003654 | Hs.104576 | carbohydrate (keratan sulfate Gal-6) sul | 2.12 | 1521 5107 |
| 418597 | AK001678 | Hs.86337 | similar to DNA-directed RNA polymerase I | 2.12 | 1216 5021 |
| 430539 | AK001489 | | ADP-ribosylation factor-like 1 | 2.12 | 2495 |
| 438730 | BE041332 | Hs.7307 | ESTs, Weakly similar to KT12_YEAST KTI12 | 2.12 | 3162 |
| 450202 | AW969756 | Hs.34145 | ESTs, Weakly similar to B49647 GTP-bindi | 2.12 | 4112 |
| 414792 | BE314949 | Hs.87128 | hypothetical protein FLJ23309 | 2.11 | 878 |
| 450042 | AI681099 | Hs.271596 | ESTs | 2.11 | 4099 |
| 413422 | AW176733 | Hs.3826 | kelch-like protein C3IP1 | 2.11 | 718 |
| 448529 | T26460 | Hs.22550 | ESTs | 2.11 | 3981 |
| 408665 | T88845 | Hs.112200 | ESTs, Weakly similar to ALU7_HUMAN ALU S | 2.11 | 289 |
| 444381 | BE387335 | Hs.283713 | hypothetical protein BC014245 | 2.11 | 3593 |
| 412133 | U83460 | Hs.73614 | solute carrier family 31 (copper transpo | 2.11 | 4874 612 |
| 429290 | AF203032 | Hs.198760 | neurofilament, heavy polypeptide (200 kD) | 2.11 | 2350 5398 |
| 418515 | AI568453 | Hs.19487 | ESTs, Weakly similar to CNIH_HUMAN CORNI | 2.11 | 1210 |
| 419395 | BE268326 | Hs.90280 | 5-aminoimidazole-4-carboxamide ribonucle | 2.11 | 1310 |
| 445892 | AV655500 | Hs.93961 | Homo sapiens mRNA; cDNA DKFZp667D095 (fr | 2.11 | 3709 |
| 408559 | W30787 | Hs.45105 | ESTs | 2.11 | 279 |
| 428826 | AL048842 | Hs.194019 | attractin | 2.11 | 2305 |
| 449188 | AW072939 | Hs.347187 | myotubularin related protein 1 | 2.11 | 4043 |
| 421307 | BE539976 | Hs.103305 | Homo sapiens mRNA; cDNA DKFZp434B0425 (f | 2.11 | 1506 |
| 414057 | AI815559 | Hs.75730 | signal recognition particle receptor (′d | 2.11 | 781 |
| 408162 | AA993833 | Hs.118527 | ESTs | 2.11 | 241 |
| 453028 | AB006532 | Hs.31442 | RecQ protein-like 4 | 2.10 | 4368 5768 |
| 421777 | BE562088 | Hs.108196 | HSPC037 protein | 2.10 | 1562 |
| 449568 | AL157479 | Hs.23740 | KIAA 1598 protein | 2.10 | 4067 |
| 405883 | | | Target Exon | 2.10 | |
| 401095 | | | NM_022363: Homo sapiens LIM homeobox prot | 2.10 | 24 4695 |
| 402840 | | | ENSP00000241321*: DJ947L8.1.6 (novel CUB | 2.10 | |
| 443784 | U82670 | | zinc finger protein 275 | 2.10 | 3550 |
| 432393 | AW205863 | Hs.133988 | hypothetical protein FKSG28 | 2.10 | 2663 |
| 430512 | AF182294 | Hs.241578 | U6 snRNA-associated Sm-like protein LSm8 | 2.10 | 2491 5453 |
| 434170 | AA626509 | Hs.122329 | ESTs | 2.10 | 2817 |
| 410001 | AB041036 | Hs.57771 | kallikrein 11 | 2.10 | 427 4834 |
| 429438 | AC006293 | | Homo sapiens killer cell Ig-like recepto | 2.10 | 2369 5406 |
| 456259 | Z44190 | Hs.83023 | peroxisomal biogenesis factor 11B | 2.10 | 4536 |
| 410430 | AW732554 | Hs.59622 | Homo sapiens, clone IMAGE: 3507281, mRNA, | 2.10 | 477 |
| 421052 | AA648486 | Hs.118993 | ESTs | 2.10 | 1477 |
| 412700 | BE222433 | | ESTs, Weakly similar to I38022 hypotheti | 2.10 | 660 |
| 441549 | BE563873 | Hs.124005 | ESTs, Weakly similar to T29899 hypotheti | 2.10 | 3356 |
| 418397 | NM_001269 | Hs.84746 | chromosome condensation 1 | 2.10 | 1195 5013 |
| 449249 | T52285 | Hs.193115 | Homo sapiens mRNA for KIAA1764 protein, | 2.10 | 4.50 |
| 429551 | AW450624 | Hs.220931 | ESTs | 2.10 | 2388 |
| 419677 | N77342 | Hs.21851 | Homo sapiens cDNA FLJ12900 fis, clone NT | 2.10 | 1348 |
| 408756 | AA524743 | | ESTs | 2.10 | 303 |
| 417952 | AI192838 | | dual-specificity tyrosine-(Y)-phosphoryl | 2.10 | 1141 |
| 447401 | BE618582 | Hs.97661 | ESTs | 2.10 | 3858 |
| 449721 | AW073727 | Hs.210265 | ESTs | 2.10 | 4078 |
| 406255 | | | Target Exon | 2.10 | |
| 441676 | BE564206 | Hs.49889 | ESTs | 2.10 | 3367 |
| 418050 | R37848 | Hs.7177 | ESTs | 2.10 | 1151 |
| 454631 | AW811324 | | gb: IL3-ST0141-131099-017-A02 ST0141 Homo | 2.10 | 4492 |
| 419575 | U43431 | Hs.91175 | topoisomerase (DNA) III alpha | 2.10 | 1334 5052 |
| 454171 | AW854832 | | gb: QV2-CT0261-201099-011-f05 CT0261 Homo | 2.10 | |
| 433923 | AI823453 | Hs.146625 | ESTs | 2.10 | 2798 |
| 443744 | AI084326 | Hs.271548 | ESTs, Weakly similar to I78885 serine/th | 2.10 | 3548 |
| 443713 | AI082810 | Hs.204934 | ESTs | 2.10 | 3543 |
| 418671 | D82344 | Hs.87202 | paired mesoderm homeobox 2b | 2.10 | 1224 5023 |
| 428585 | AB007863 | Hs.185140 | KIAA0403 protein | 2.10 | 2274 5366 |
| 404306 | | | Target Exon | 2.10 | |
| 433745 | AF075320 | Hs.28980 | hypothetical protein FLJ14540 | 2.10 | 2786 |
| 410232 | AW372451 | Hs.61184 | CGI-79 protein | 2.10 | 458 |
| 452335 | AW188944 | Hs.61272 | ESTs | 2.10 | 4297 |
| 454427 | AW605620 | Hs.76064 | ribosomal protein L27a | 2.10 | 4483 |
| 450963 | AI864668 | Hs.48832 | ESTs | 2.10 | 4179 |
| 427540 | R12014 | Hs.20976 | ESTs | 2.10 | 2162 |
| 406740 | AA577274 | | gb: nm85g07.s1 NCI_CGAP_Co9 Homo sapiens | 2.10 | 95 |
| 429263 | AA019004 | Hs.198396 | ATP-binding cassette, sub-family A (ABC1 | 2.10 | 2345 |
| 419485 | AA489023 | Hs.99807 | ESTs, Weakly similar to unnamed protein | 2.10 | 1318 |
| 407644 | D16815 | | nuclear receptor subfamily 1, group D, m | 2.10 | 176 4777 |
| 429058 | AF138863 | Hs.35254 | hypothetical protein FLB6421 | 2.10 | 2331 5389 |
| 410382 | AW664971 | Hs.259546 | ESTs | 2.10 | 470 |
| 431788 | AA992677 | | thymopoietin | 2.10 | 2598 |
| 419200 | AW966405 | | EST | 2.09 | 1288 |
| 436315 | BE390513 | Hs.27935 | hypothetical protein MGC4837 | 2.09 | 2980 |
| 421462 | AF016495 | Hs.104624 | aquaporin 9 | 2.09 | 1522 5108 |
| 420711 | R18398 | | ESTs | 2.09 | 1444 |
| 419667 | AU077005 | Hs.92208 | a disintegrin and metalloproteinase doma | 2.09 | 1346 |
| 412430 | AW675064 | Hs.73875 | fumarylacetoacetate hydrolase (fumarylac | 2.09 | 630 |
| 424197 | AF096834 | Hs.142989 | germ cell specific Y-box binding protein | 2.09 | 1814 5202 |
| 437623 | D63880 | Hs.5719 | chromosome condensation-related SMC-asso | 2.09 | 3076 5587 |
| 445863 | R12234 | Hs.13396 | Homo sapiens clone 25028 mRNA sequence | 2.09 | 3703 |
| 450306 | AL080080 | Hs.24766 | thioredoxin domain-containing | 2.09 | 4127 5728 |
| 412939 | AW411491 | Hs.75069 | eukaryotic translation elongation factor | 2.09 | 684 |
| 407276 | AI951118 | Hs.326736 | Homo sapiens breast cancer antigen NY-BR | 2.09 | 147 |
| 408283 | BE141579 | | gb: QV2-HT0083-071299-018-b05 HT0083 Homo | 2.09 | 251 |
| 414198 | AW505308 | Hs.75812 | phosphoenolpyruvate carboxykinase 2 (mit | 2.09 | 798 |
| 448556 | AW885606 | Hs.5064 | ESTs | 2.09 | 3985 |
| 424505 | AA446131 | Hs.124918 | KIAA1795 protein | 2.09 | 1853 |
| 426691 | NM_006201 | Hs.171834 | PCTAIRE protein kinase 1 | 2.09 | 2088 5314 |
| 448545 | BE543187 | Hs.105097 | thymidine kinase 1, soluble | 2.09 | 3982 |
| 432901 | AI554929 | Hs.281866 | ATPase, H transporting, lysosomal (vacuo | 2.09 | 2710 |
| 447976 | AW972653 | Hs.293691 | ESTs, Highly similar to CR2_HUMAN COMPLE | 2.09 | 3931 |
| 417378 | R57256 | Hs.82037 | TATA box binding protein (TBP)-associate | 2.09 | 1088 |
| 413643 | AA130987 | Hs.188727 | ESTs | 2.09 | 743 |
| 408201 | AK000568 | Hs.43654 | hypothetical protein FLJ20561 | 2.09 | 2444791 |
| 443031 | AW134096 | Hs.49418 | ESTs | 2.09 | 3488 |
| 450898 | N54911 | Hs.171765 | ESTs | 2.09 | 4173 |
| 455908 | BE156306 | | gb: QV0-HT0367-150200-114-h04 HT0367 Homo | 2.09 | 4523 |
| 404053 | | | Target Exon | 2.09 | |
| 457242 | AA457011 | Hs.80261 | gb: aa90c11.r1 Stratagene fetal retina 93 | 2.09 | 4585 |
| 430354 | AA954810 | Hs.239784 | human homolog of Drosophila Scribble | 2.09 | 2474 |
| 443119 | AA312264 | Hs.7980 | hypothetical protein MGC12966 | 2.09 | 3498 |
| 400834 | | | NM_002240*: Homo sapiens potassium inward | 2.09 | 21 4692 |
| 408338 | AW867079 | | gb: MR1-SN0033-120400-002-c10 SN0033 Homo | 2.09 | 256 |
| 426399 | AA652588 | Hs.301348 | Homo sapiens cDNA FLJ13271 fis, clone OV | 2.09 | 2061 |
| 422830 | AC007954 | Hs.121371 | hypothetical protein DKFZp434P0111 | 2.08 | 1685 5159 |
| 458676 | AI692464 | Hs.202263 | ESTs | 2.08 | 4632 |
| 417939 | R53863 | Hs.337512 | ESTs, Weakly similar to ALUB_HUMAN !!!! | 2.08 | 1140 |
| 452184 | R16281 | Hs.21701 | linked to Surfeit genes in Fugu rubripes | 2.08 | 4280 |
| 408822 | AW500715 | Hs.57079 | Homo sapiens cDNA FLJ13267 fis, clone OV | 2.08 | 308 |
| 429305 | AF095727 | Hs.287832 | myelin protein zero-like 1 | 2.08 | 2353 5400 |
| 419355 | AA428520 | Hs.90061 | progesterone binding protein | 2.08 | 1304 |
| 447887 | AA114050 | Hs.19949 | caspase 8, apoptosis-related cysteine pr | 2.08 | 3918 |
| 421443 | BE550141 | Hs.156148 | hypothetical protein FLJ13231 | 2.08 | 1520 |
| 451422 | AB002336 | Hs.26395 | erythrocyte membrane protein band 4.1-li | 2.08 | 4222 5744 |
| 423797 | BE259364 | Hs.132898 | fatty acid desaturase 1 | 2.08 | 1775 |
| 401192 | | | Target Exon | 2.08 | |
| 440028 | AW473675 | | ESTs, Weakly similar to T17227 hypotheti | 2.08 | 3253 |
| 449769 | AI668700 | Hs.226564 | ESTs, Moderately similar to ALU6_HUMAN A | 2.08 | 4081 |
| 450330 | AW500775 | Hs.24817 | hypothetical protein FLJ20136 | 2.08 | 4130 |
| 453518 | AW503205 | Hs.27268 | gb: UI-HF-BN0-akt-g-03-0-UI.r1 NIH_MGC_50 | 2.08 | 4417 |
| 420750 | AW190215 | Hs.62348 | hypothetical protein FLJ11753 | 2.08 | 1449 |
| 434033 | AI631749 | Hs.156616 | ESTs, Weakly similar to alternatively sp | 2.08 | 2807 |
| 425001 | U55184 | Hs.154145 | hypothetical protein FLJ11585 | 2.08 | 1908 5241 |
| 414809 | AI434699 | Hs.77356 | transferrin receptor (p90, CD71) | 2.08 | 880 |
| 411580 | AL080088 | Hs.70877 | DKFZP564K2062 protein | 2.08 | 4865 561 |
| 432458 | AI968598 | Hs.78768 | malignant cell expression-enhanced gene/ | 2.08 | 2669 |
| 459646 | AW883968 | Hs.321190 | gb: QV3-OT0063-290300-135-c04 OT0063 Homo | 2.08 | 4674 |
| 434350 | AL042940 | Hs.93872 | KIAA1682 protein | 2.08 | 2831 |
| 436610 | AW611912 | Hs.98751 | ESTs | 2.08 | 2998 |
| 413045 | X92121 | Hs.75180 | protein phosphatase 5, catalytic subunit | 2.08 | 4892 691 |
| 416855 | AA188763 | Hs.36793 | hypothetical protein FLJ23188 | 2.08 | 1032 |
| 423137 | NM_007212 | Hs.124186 | ring finger protein 2 | 2.08 | 1721 5171 |
| 427239 | BE270447 | | ubiquitin carrier protein | 2.08 | 2134 |
| 426526 | BE617944 | Hs.170226 | Homo sapiens clone 23579 mRNA sequence | 2.07 | 2075 |
| 411619 | AI418609 | Hs.71040 | hypothetical protein FLJ20425 | 2.07 | 564 |
| 420762 | U51699 | | dolichyt-phosphate (UDP-N-acetylglucosam | 2.07 | 1451 |
| 457133 | M54968 | | v-Ki-ras2 Kirsten rat sarcoma 2 viral on | 2.07 | 4580 5811 |
| 414581 | AA256213 | Hs.72010 | ESTs | 2.07 | 849 |
| 430750 | AI650360 | Hs.100256 | ESTs | 2.07 | 2511 |
| 405760 | | | Target Exon | 2.07 | |
| 436862 | AI821940 | Hs.116567 | ESTs, Moderately similar to ALU8_HUMAN A | 2.07 | 3013 |
| 453690 | AI674872 | Hs.107000 | hypothetical protein FLJ11294 | 2.07 | 4424 |
| 435750 | AB029012 | Hs.4990 | KIAA1089 protein | 2.07 | 2939 5570 |
| 428977 | AK001404 | Hs.194698 | cyclin B2 | 2.07 | 2323 |
| 431188 | W05656 | Hs.169755 | ESTs | 2.07 | 2538 |
| 410407 | X66839 | Hs.63287 | carbonic anhydrase IX | 2.07 | 474 4846 |
| 418874 | T60872 | | gb: yb72h11.s1 Stratagene ovary (937217) | 2.07 | 1253 |
| 416305 | AU076628 | Hs.79187 | coxsackie virus and adenovirus receptor | 2.07 | 985 |
| 441252 | AW360901 | | hypothetical protein MGC4399 | 2.07 | 3341 |
| 420596 | NM_002692 | Hs.99185 | polymerase (DNA directed), epsilon 2 | 2.07 | 1435 5082 |
| 408546 | W49512 | Hs.46348 | bradykinin receptor B1 | 2.07 | 277 |
| 404071 | | | C12000514*: gi\|7302471\|gb\|AAF57556.1\|(AE | 2.07 | |
| 408946 | AW854991 | Hs.255565 | ESTs | 2.07 | 318 |
| 420614 | AL110291 | Hs.99364 | putative transmembrane protein | 2.07 | 1438 |
| 404754 | | | C3001259: gi\|476355\|pir\|\|A46762 myosin al | 2.07 | 61 |
| 424055 | AA337234 | | gb: EST42299 Endometrial tumor homo sapie | 2.06 | 1797 |
| 434875 | AW974785 | Hs.290831 | ESTs | 2.06 | 2877 |
| 418793 | AW382987 | Hs.88474 | prostaglandin-endoperoxide synthase 1 (p | 2.06 | 1240 |
| 405710 | | | CX000682: gi\|12741327\|reflHP_008833.2\| zi | 2.06 | |
| 421604 | AW293880 | Hs.248367 | MEGF11 protein | 2.06 | 1542 |
| 447370 | AW248150 | Hs.18349 | mitochondrial ribosomal protein L15 | 2.06 | 3850 |
| 411800 | N39342 | Hs.103042 | microtubule-associated protein 1B | 2.06 | 579 |
| 442993 | BE018682 | Hs.166196 | ATPase, Class I type 8B, member 1 | 2.06 | 3486 |
| 434075 | AW003416 | Hs.160604 | ESTs | 2.06 | 2813 |
| 428583 | AA430589 | Hs.75410 | heat shock 70 kD protein 5 (glucose-regul | 2.06 | 2273 |
| 422975 | AA347720 | Hs.122669 | KIAA0264 protein | 2.06 | 1704 |
| 451273 | NM_014811 | Hs.26163 | KIAA0649 gene product | 2.06 | 4206 5741 |
| 433399 | N46406 | Hs.84700 | similar to phosphatidylcholine transfer | 2.06 | 2760 |
| 431849 | AI670823 | Hs.85573 | hypothetical protein MGC10911 | 2.06 | 2607 |
| 420324 | AF163474 | Hs.96744 | prostate androgen-regulated transcript 1 | 2.06 | 1412 5074 |
| 443677 | AV646096 | Hs.282990 | ESTs, Weakly similar to B34087 hypotheti | 2.06 | 3537 |
| 405779 | | | NM_005367: Homo sapiens melanoma antigen, | 2.06 | 4741 75 |
| 439357 | AW955708 | Hs.100651 | golgi SNAP receptor complex member 2 | 2.06 | 3203 |
| 400880 | | | NM_000611*: Homo sapiens CD59 antigen p18 | 2.05 | 23 4694 |
| 415079 | R43179 | Hs.22895 | hypothetical protein FLJ23548 | 2.05 | 906 |
| 415788 | AW628686 | Hs.78851 | KIAA0217 protein | 2.05 | 952 |
| 405697 | | | gb: Human homeobox-like mRNA | 2.05 | |
| 431441 | U81961 | Hs.2794 | sodium channel, nonvoltage-gated 1 alpha | 2.05 | 2554 5475 |
| 408086 | AW351543 | Hs.42514 | hypothetical protein F25965 | 2.05 | 232 |
| 458335 | AI762479 | | gb: wh91a04x1 NCl_CGAP_CLL1 Homo sapiens | 2.05 | 4618 |
| 401898 | | | NM_024722*: Homo sapiens hypothetical pro | 2.05 | 30 4700 |
| 425255 | AW374106 | Hs.155356 | hypothetical protein MGC2840 similar to | 2.05 | 1944 |
| 413976 | BE295452 | Hs.75655 | procollagen-proline, 2-oxolgutate 4-di | 2.05 | 771 |
| 421937 | AI878857 | Hs.109706 | hematological and neurological expressed | 2.05 | 1582 |
| 426329 | AL389951 | Hs.271623 | nucleporin 50 kD | 2.05 | 2054 5300 |
| 445243 | AI217439 | | ESTs, Weakly similar to ALU1_HUMAN ALU S | 2.05 | 3662 |
| 451930 | BE259124 | Hs.27262 | Homo sapiens clone 25110 mRNA sequence | 2.05 | 4257 |
| 431846 | BE019924 | Hs.271580 | uroplakin 1B | 2.05 | 2605 |
| 410847 | AW807090 | | gb: MR4-ST0062-031199-018-d12 ST0062 Homo | 2.05 | 517 |
| 449523 | NM_000579 | Hs.54443 | chemokline (C-C motif) receptor 5 | 2.05 | 4064 5721 |
| 411051 | AW853931 | | gb: RC3-CT0254-180200-026-e04 CT0254 Homo | 2.05 | 531 |
| 418967 | NM_001725 | Hs.89535 | bactericidal/permeability-increasing pro | 2.05 | 1265 5035 |
| 408841 | AW438865 | Hs.256862 | ESTs | 2.05 | 312 |
| 403509 | | | KIAA0539 gene product | 2.05 | |
| 418898 | T66847 | Hs.194040 | ESTs, Weakly similar to I38022 hypotheti | 2.05 | 1257 |
| 453438 | AI469935 | Hs.22792 | ESTs | 2.05 | 4405 |
| 443084 | AI27639 | Hs.125539 | ESTs | 2.05 | 3495 |
| 410656 | BE161335 | Hs.321717 | ESTs, Weakly similar to S22765 heterogen | 2.05 | 501 |
| 441879 | AI1521936 | Hs.107149 | novel protein similar to archaeal, yeast | 2.05 | 3377 |
| 453081 | AI951203 | Hs.223345 | ESTs | 2.05 | 4374 |
| 455211 | AW866449 | | gb: QV4-SN0024-170400-176-a12 SN0024 Homo | 2.05 | 4502 |
| 448824 | L41147 | Hs.22180 | 5-hydroxytyptamine (serotonin) receptor | 2.05 | 4011 5714 |
| 418319 | AW611703 | Hs.190173 | ESTs, Weakly similar to A46010 X-linked | 2.05 | 1183 |
| 442317 | AI915599 | Hs.129225 | ESTs | 2.05 | 3415 |
| 400249 | | | Eos Control | 2.05 | |
| 439092 | AA830149 | | gb: oc44f08.s1 NCl_CGAP_GCB1 Homo sapiens | 2.05 | 3185 |
| 448390 | AL035414 | Hs.21068 | hypothetical protein | 2.05 | 3963 |
| 422661 | NM_014700 | Hs.119004 | KIAA0665 gene product | 2.05 | 1669 5156 |
| 444682 | R37390 | Hs.21119 | ESTs | 2.05 | 3619 |
| 428315 | AA688152 | Hs.98505 | ESTs | 2.05 | 2239 |
| 440953 | AI683036 | Hs.124135 | Homo sapiens cDNA FLJ13051 fis, clone NT | 2.05 | 3321 |
| 427178 | AA398866 | Hs.97542 | Homo sapiens testis-development related | 2.05 | 2130 |
| 414212 | AA136569 | Hs.10848 | KIAA0187 gene product | 2.05 | 800 |
| 415892 | H08267 | Hs.302330 | ESTs, Moderately similar to JC5238 galac | 2.05 | 958 |
| 424624 | AB032947 | Hs.151301 | Ca2+dependent activator protein for secr | 2.05 | 1864 5220 |
| 454838 | AW833984 | | gb: QV0-TT0010-031199-045-a05 TT0010 Homo | 2.05 | 4497 |
| 414709 | AA704703 | Hs.77031 | Sp2 transcription factor | 2.05 | 866 |
| 401463 | | | histone deacetylase 5 | 2.05 | |
| 453849 | N35321 | Hs.278611 | UDP-N-acetyl-alpha-D-galactosamine: polyp | 2.05 | 4436 |
| 453344 | BE349075 | Hs.44571 | ESTs | 2.05 | 4397 |
| 431790 | AA650250 | Hs.272076 | ESTs | 2.05 | 2600 |
| 457898 | AI382260 | Hs.129943 | ESTs, Weakly similar to high-risk human | 2.05 | 4604 |
| 443423 | AW162357 | Hs.7023 | ESTs | 2.06 | 3522 |
| 426172 | AA371307 | Hs.125056 | ESTs | 2.06 | 2035 |
| 423871 | AA331906 | Hs.175596 | gb: EST35805 Embryo, 8 week I Homo sapien | 2.05 | 1783 |
| 432146 | AW081072 | Hs.115960 | KIAA0939 protein | 2.05 | 2635 |
| 422906 | U80773 | Hs.121580 | Human EST clone 42944 mariner transposon | 2.05 | 1691 |
| 444822 | BE164351 | Hs.292767 | hypothetical protein FLJ23109 | 2.05 | 3631 |
| 422273 | AA307796 | Hs.269548 | ESTs | 2.05 | 1624 |
| 418690 | AK000052 | Hs.87293 | hypothetical protein FLJ20045 | 2.05 | 1228 5026 |
| 400730 | | | Target Exon | 2.05 | |
| 429128 | AA446869 | Hs.119316 | ESTs | 2.05 | 2333 |
| 416732 | H81066 | Hs.285017 | hypothetical protein FLJ21799 | 2.05 | 1017 |
| 423248 | AA380177 | Hs.125845 | ribulose-5-phosphate-3-epimerase | 2.05 | 1731 |
| 420544 | AA677577 | Hs.98732 | Homo sapiens Chromosome 16 BAC clone CIT | 2.05 | 1429 |
| 427356 | AW023482 | Hs.97849 | ESTs | 2.05 | 2147 |
| 435147 | AL133731 | Hs.4774 | Homo sapiens mRNA; cDNA DKFZp761C1712 (f | 2.05 | 2900 |
| 440184 | AB002297 | Hs.7022 | dedicator of cyto-kinesis 3 | 2.05 | 3269 5604 |
| 415025 | AW207091 | Hs.72307 | ESTs | 2.05 | 902 |
| 409205 | AI952884 | Hs.14832 | ESTs, Moderately similar to unnamed prot | 2.05 | 351 |
| 437672 | AW748265 | Hs.5741 | flavohemoprotein b5? | 2.05 | 3080 |
| 413916 | N49813 | Hs.75615 | apolipoprotein C-II | 2.05 | 763 |
| 403794 | | | Target Exon | 2.05 | |
| 437287 | AA748180 | Hs.159346 | hypothetical protein FLJ21369 | 2.05 | 3056 |
| 435542 | AA687376 | | ESTs | 2.05 | 2925 |
| 444391 | AL137597 | Hs.11114 | hypothetical protein dJ1181N3.1 | 2.05 | 3595 |
| 408353 | BE439838 | Hs.44298 | mitochondrial ribosomal protein S17 | 2.05 | 259 |
| 428865 | BE544095 | Hs.164960 | BarH-like homeobox 1 | 2.05 | 2314 |
| 421282 | AA286914 | Hs.40782 | ESTs | 2.05 | 1502 |
| 431250 | BE264649 | Hs.251377 | taxol resistance associated gene 3 | 2.05 | 2544 |
| 452206 | AW340281 | Hs.33074 | Homo sapiens, close IMAGE: 3606519, mRNA, | 2.05 | 4281 |
| 435730 | AB020635 | Hs.4984 | KIAA0828 protein | 2.04 | 2938 5569 |
| 404496 | | | Target Exon | 2.04 | |
| 449378 | AW664026 | Hs.59892 | ESTs | 2.04 | 4059 |
| 447528 | AI612027 | Hs.76277 | Homo sapiens, clone MGC: 9381, mRNA, comp | 2.04 | 3874 |
| 412276 | BE262621 | Hs.73798 | macrophage migration inhibitory factor ( | 2.04 | 621 |
| 400547 | | | C10000695: gi\|3153229\|gb\|AAC17225.1\| (AF0 | 2.04 | |
| 454279 | AW295650 | Hs.255453 | ESTs, Weakly similar to ALU1_HUMAN ALU S | 2.04 | 4474 |
| 435784 | AA705437 | | ESTs | 2.04 | 2943 |
| 452731 | AW451468 | Hs.257455 | ESTs | 2.04 | 4338 |
| 456381 | AA236606 | | gb: zr99b10.r1 NCI_CGAP_GCB1 Homo sapiens | 2.04 | 4540 |
| 436028 | AA731124 | Hs.15430 | ESTs | 2.04 | 2957 |
| 417169 | R13550 | Hs.21388 | ESTs | 2.04 | 1066 |
| 450052 | AI681298 | Hs.236524 | ESTs | 2.04 | 4100 |
| 412520 | AA442324 | Hs.795 | H2A histone family, member O | 2.04 | 642 |
| 456756 | AI494486 | Hs.148767 | ESTs | 2.04 | 4559 |
| 416680 | AW245540 | Hs.79516 | brain abundant, membrane attached signal | 2.04 | 1013 |
| 417630 | D63877 | Hs.82324 | KIAA0157 protein | 2.04 | 1108 4992 |
| 409617 | BE003760 | Hs.55209 | Homo sapiens mRNA; cDNA DKFZp434K0514 (f | 2.04 | 387 |
| 440603 | AL121733 | Hs.7299 | Novel human gene mapping to chomosome 1 | 2.04 | 3304 5610 |
| 412636 | NM_004415 | | desmoplakin (DPI, DPII) | 2.04 | 4882 652 |
| 454516 | AW803341 | | gb: IL2-UM0079-090300-050-D03 UM0079 Homo | 2.04 | 4488 |
| 414054 | BE244328 | Hs.288539 | hypothetical protein FLJ22191 | 2.04 | 780 |
| 419058 | AW675039 | Hs.1227 | aminolevulinate, delta-, dehydratase | 2.04 | 1271 |
| 422565 | BE259035 | Hs.118400 | singed (Drosophila)-like (sea urchin fas | 2.04 | 1657 |
| 447782 | AI668903 | | ESTs | 2.04 | 3906 |
| 413645 | AA130992 | | gb: zo15e02.s1 Stratagene colon (937204) | 2.04 | 744 |
| 456534 | X91195 | Hs.100623 | phospholipase C, beta 3, neighbor pseudo | 2.04 | 4549 |
| 433747 | AI004012 | Hs.143752 | ESTs | 2.04 | 2787 |
| 433071 | BE150229 | Hs.281564 | retinal outer segment membrane protein 1 | 2.04 | 2731 |
| 410840 | AW806924 | | gb: QV4-ST0023-160400-172-h10 ST0023 Homo | 2.04 | 516 |
| 425304 | AA463844 | Hs.31339 | fibroblast growth factor 11 | 2.04 | 1949 |
| 447711 | AI459554 | Hs.161286 | ESTs | 2.04 | 3895 |
| 449226 | AB002365 | Hs.23311 | KIAA0367 protein | 2.04 | 4047 5720 |
| 411957 | AW246216 | Hs.32058 | Homo sapiens C1orf19 mRNA, partial cds | 2.04 | 593 |
| 423226 | AA323414 | Hs.146109 | ESTs, Weakly similar to T28937 hypotheti | 2.04 | 1729 |
| 436045 | AB037723 | Hs.5028 | DKFZP564O0423 protein | 2.04 | 2959 5574 |
| 417433 | BE270266 | Hs.82128 | 5T4 oncofetal trophoblast glycoprotein | 2.04 | 1094 |
| 424744 | AW175781 | Hs.152720 | M-phase phosphoprotein 6 | 2.03 | 1881 |
| 437478 | AL390172 | Hs.317432 | branched chain aminotransferase 1, cytos | 2.03 | 3067 |
| 445003 | AI204593 | Hs.148698 | ESTs | 2.03 | 3644 |
| 432674 | AA641092 | Hs.257339 | ESTs, Weakly similar to I38022 hypotheti | 2.03 | 2690 |
| 431763 | NM_005136 | Hs.268538 | potassium voltage-gated channel, Isk-rel | 2.03 | |
| 435647 | AI653240 | Hs.49823 | ESTs | 2.03 | 2934 |
| 419341 | N71463 | Hs.118888 | ESTs, Weakly similar to ALU1_HUMAN ALU S | 2.03 | 1302 |
| 414486 | AW305026 | Hs.193974 | ESTs, Weakly similar to ALU1_HUMAN ALU S | 2.03 | 836 |
| 430383 | AI861854 | Hs.210778 | hypothetical protein FLJ10989 | 2.03 | 2478 |
| 423994 | X01057 | Hs.1724 | interleukin 2 receptor, alpha | 2.03 | 1787 5192 |
| 430828 | AI763257 | Hs.86327 | Homo sapiens cDNA: FLJ22431 fis, clone H | 2.03 | 2517 |
| 438307 | AB011093 | Hs.6150 | hypothetical protein MGC15913 | 2.03 | 3131 5594 |
| 419904 | AA974411 | Hs.18672 | ESTs | 2.03 | 1368 |
| 412017 | AA812143 | Hs.23767 | hypothetical protein FLJ12666 | 2.03 | 603 |
| 429671 | BE379335 | Hs.211594 | proteasome (prosome, macropain) 26S subu | 2.03 | 2405 |
| 437258 | AL041243 | Hs.174104 | ESTs | 2.03 | 3050 |
| 437103 | AA424881 | Hs.256301 | hypothetical protein MGC13170 | 2.03 | 124 |
| 439930 | AI218704 | Hs.144975 | ESTs | 2.03 | 3244 |
| 458207 | T28472 | Hs.7655 | U2 small nuclear ribonucleoprotein auxil | 2.03 | 4615 |
| 452882 | AW972990 | Hs.196270 | folate transporter/carrrier | 2.03 | 4357 |
| 406542 | | | C19000728*: gi\|12585552\|sp\|Q9Y2Q1\|Z257_HU | 2.03 | |
| 439941 | AI392640 | Hs.18272 | amino acid transporter system A1 | 2.03 | 3246 |
| 452277 | AL049013 | Hs.28783 | KIAA1223 protein | 2.03 | 4292 |
| 441959 | BE536998 | Hs.200360 | Homo sapiens cDNA FLJ13027 fis, clone NT | 2.03 | 3382 |
| 424899 | AL119387 | Hs.119062 | ESTs | 2.03 | 1897 |
| 418683 | U90908 | Hs.87241 | hypothetical protein from clones 23549 a | 2.03 | 1227 5025 |
| 437818 | AA769054 | | gb: oa74a08.s1 NCI_CGAP_GCB1 Homo sapiens | 2.03 | 3094 |
| 433068 | NM_006456 | Hs.288215 | sialyltransferase | 2.03 | 2730 5526 |
| 418057 | NM_012151 | Hs.83363 | coagulation factor VIII-associated (intr | 2.03 | 1153 5002 |
| 439564 | W77911 | Hs.110006 | ESTs | 2.03 | 3216 |
| 424287 | AL133105 | Hs.144633 | hypothehticat protein DKFZp434F2322 | 2.03 | 1825 5208 |
| 424075 | AI807320 | Hs.227630 | RE1-silencing transcription factor | 2.03 | 1799 |
| 426746 | J03626 | Hs.2057 | uridine monophosphate synthetase (orotat | 2.03 | 2092 5317 |
| 421690 | AW162667 | Hs.106857 | calbindin 2, (29 kD, calretinin) | 2.02 | 1554 |
| 426096 | D87436 | Hs.166318 | lipin 2 | 2.02 | 2025 5290 |
| 421626 | AI739285 | Hs.153959 | hypothetical protein MGC15436 | 2.02 | 1546 |
| 439768 | AI337300 | Hs.173138 | hypothetical protein MGC4604 | 2.02 | 3233 |
| 459001 | AI761313 | Hs.204605 | ESTs | 2.02 | 4651 |
| 451044 | AL117665 | Hs.25882 | DKFZP586M1824 protein | 2.02 | 4185 5737 |
| 448262 | AW880830 | Hs.186273 | Homo sapiens quiescin Q6 (QSCN6) | 2.02 | 3953 |
| 425256 | BE297611 | Hs.155392 | collapsin response mediator protein 1 | 2.02 | 1945 |
| 409632 | W74001 | Hs.55279 | serine (or cysteine) proteinase inhibito | 2.02 | 390 |
| 414045 | NM_002951 | Hs.75722 | ribophorin II | 2.02 | 4911 777 |
| 410072 | BE384447 | Hs.16034 | hypothetical protein MGC13186 | 2.02 | 439 |
| 408212 | AA297567 | Hs.43728 | hypothetical protein | 2.02 | 245 |
| 452732 | BE300078 | Hs.80449 | Homo sapiens, clone IMAGE: 3535294, mRNA, | 2.02 | 4339 |
| 436251 | BE515065 | Hs.296585 | nucleolar protein (KKE/D repeat) | 2.02 | 2971 |
| 422532 | AL008726 | Hs.118126 | protective protein for beta-galactosidas | 2.02 | 1653 5153 |
| 441297 | AW403084 | Hs.7766 | ubiquitin-conjugating enzyme E2E 1 (Homo | 2.02 | 3344 |
| 450649 | NM_001429 | Hs.25272 | E1A binding protein p300 | 2.02 | 4143 5732 |
| 432673 | AB028859 | Hs.278605 | DnaJ (Hsp40) homolog, subfamily B, membe | 2.02 | 2689 5510 |
| 424996 | AF006005 | Hs.154104 | pleiomorphic adenoma gene-like 2 | 2.01 | 1906 5239 |
| 418514 | AW068487 | Hs.25413 | TOLLIP protein | 2.01 | 1209 |
| 406687 | M31126 | | matrix metalloproteinase 11 (stromelysin | 2.01 | 4747 85 |
| 400133 | | | Eos Control | 2.01 | |
| 449701 | AW952323 | Hs.129908 | KIAA0591 protein | 2.01 | 4075 |
| 401405 | | | Target Exon | 2.01 | |
| 434042 | AI589941 | Hs.8254 | Homo sapiens, Similar to tumor different | 2.01 | 2808 |
| 408618 | AK000637 | Hs.46624 | HSPC043 protein | 2.01 | 284 |
| 447757 | AA071276 | Hs.19469 | KIAA0859 protein | 2.01 | 3901 |
| 432221 | M21191 | Hs.273415 | aldolase A, fructose-bisphosphate | 2.01 | 2644 |
| 400219 | | | Eos Control | 2.01 | |
| 400845 | | | NM_003105*: Homo sapiens sortilin-retated | 2.01 | 22 4693 |
| 412247 | AF022375 | Hs.73793 | vascular endothelial growth factor | 2.01 | 4876 620 |
| 413248 | T64858 | Hs.26966 | hypothetical protein DKFZp547J036 | 2.01 | 703 |
| 419663 | AA394208 | Hs.92198 | calcium-regulated heat-stable protein (2 | 2.00 | 1345 |
| 444418 | AL034417 | Hs.11169 | Gene 33/Mig-6 | 2.00 | 3596 |
| 414653 | M24486 | Hs.76768 | procollagen-proline, 2-oxoglutarate 4-di | 2.00 | 4922 858 |
| 425157 | NM_006227 | Hs.283007 | phospholipid transfer protein | 2.00 | 1930 5248 |
| 446160 | AW392197 | Hs.218003 | ESTs | 2.00 | 3728 |
| 444042 | NM_004915 | Hs.10237 | ATP-binding cassette, sub-family G (WHIT | 2.00 | 3570 5634 |
| 456895 | AA354771 | Hs.43047 | Homo sapiens cDNA FLJ13585 fis, clone PL | 2.00 | 4565 |
| 458421 | AI279978 | Hs.22547 | ESTs | 2.00 | 4623 |
| 412999 | BE046255 | | gb: hn38g10.x2 NCI_CGAP_RDF2 Homo sapiens | 2.00 | |
| 458984 | AA011185 | Hs.221189 | hypothetical protein FLJ14431 | 2.00 | 4649 |
| 444601 | AV650521 | Hs.282449 | ESTs, Moderately similar to ZN91_HUMAN Z | 2.00 | 3612 |
| 403935 | | | Target Exon | 2.00 | |
| 421258 | AA286731 | | gb: zs53d08.r1 NCI_CGAP_GCB1 Homo sapiens | 2.00 | 1498 |
| 409628 | AB021865 | Hs.55276 | potassium voltage-gated channel, Shal-re | 2.00 | 389 4829 |
| 404705 | | | Target Exon | 2.00 | |
| 404592 | | | NM_022739*: Homo sapiens E3 ubiquitin lig | 2.00 | 4725 58 |
| 456425 | AA423846 | Hs.15220 | zinc finger protein 106 | 2.00 | 4541 |
| 429731 | AK001592 | Hs.212172 | beta-carotene 15,15′-dioxygenase | 2.00 | 2411 5423 |
| 454363 | AW816274 | Hs.250154 | hypothetical protein FLJ12973 | 2.00 | 4479 |
| 414390 | BE281040 | | gb: 601156234F1 NIH_MGC_21 Homo sapiens c | 2.00 | 820 |
| 458215 | AA928160 | | gb: on86f10.s1 Soares_NFL_T_GBC_S1 Homo s | 2.00 | 4616 |
| 447500 | AI381900 | Hs.159212 | ESTs | 2.00 | 3870 |
| 445790 | AV655170 | Hs.49015 | chromosome 21 open reading frame 35 | 2.00 | 3698 |
| 445511 | AA846512 | | Homo sapiens cDNA FLJ14459 fis, clone HE | 2.00 | 3679 |
| 402239 | | | Target Exon | 2.00 | |
| 448798 | Z28671 | Hs.58606 | SNRPN upstream reading frame | 2.00 | 4008 |
| 437829 | AI358522 | Hs.103834 | ESTs | 2.00 | 3095 |
| 452470 | AI903246 | | gb: RC-BT029-070199-024 BT029 Homo sapien | 2.00 | 4313 |
| 439932 | AI589851 | | ESTs | 2.00 | 3245 |
| 425146 | AW954627 | Hs.48794 | gb: EST366697 MAGE resequences, MAGC Homo | 2.00 | 1928 |
| 417609 | AI189754 | Hs.86320 | ESTs | 2.00 | 1106 |
| 430838 | N46664 | Hs.169395 | hypothetical protein FLJ12015 | 2.00 | 2518 |
| 454525 | BE280421 | Hs.94499 | ESTs | 2.00 | 4489 |
| 454607 | AW809845 | Hs.288568 | hypothetical protein FLJ22644 | 2.00 | 4491 |
| 449016 | BE615854 | | gb: 601279735F1 NIH_MGC_39 Homo sapiens c | 2.00 | 4027 |
| 402889 | | | ENSP00000217123*: FLJ00118 protein (Fragm | 2.00 | |
| 427696 | R39126 | Hs.8038 | ESTs | 2.00 | 2183 |
| 423077 | Z78283 | | gb: Z78283 Homo sapiens brain fetus Homo | 2.00 | 1716 |
| 441373 | AI266421 | Hs.120179 | Homo sapiens cDNA: FLJ22133 fis, clone H | 2.00 | 3348 |
| 434328 | BE564937 | Hs.15984 | pp21 homolog | 2.00 | 2829 |
| 443826 | AI214805 | Hs.27232 | ESTs | 2.00 | 3556 |
| 443273 | AI042063 | Hs.132156 | ESTs | 2.00 | 3515 |
| 452999 | AI755080 | Hs.26481 | SBBI26 protein | 2.00 | 4364 |
| 451684 | AF216751 | Hs.26813 | CDA14 | 2.00 | 4240 5747 |
| 430707 | AF082350 | Hs.247820 | bone morphogenetic protein 15 | 2.00 | 2506 5462 |
| 408006 | H57654 | Hs.303345 | ESTs, Weakly similar to I38022 hypotheti | 2.00 | 224 |
| 400750 | | | Target Exon | 2.00 | |
| 419321 | N48146 | Hs.269069 | ESTs, Weakly similar to I38022 hypotheti | 2.00 | 1300 |
| 459234 | AI940425 | | gb: CM0-CT0052-150799-024-c04 CT0052 Homo | 2.00 | 4660 |
| 436277 | R88520 | Hs.120917 | ESTs | 2.00 | 2973 |
| 451106 | BE382701 | Hs.25960 | N-MYC oncogene | 2.00 | 4193 |
| 418284 | AW948651 | Hs.26002 | LIM domain binding 1 | 2.00 | 1176 |
| 413402 | T24065 | | gb: seq2245 HMSWMYK Homo sapiens cDNA clo | 2.00 | 715 |
| 438701 | AA937112 | Hs.207788 | ESTs | 2.00 | 3158 |
| 434481 | AF143330 | Hs.12621 | Homo sapiens clone IMAGE: 112577 mRNA seq | 2.00 | 2843 |
| 415121 | D60971 | Hs.34955 | Homo sapiens cDNA FLJ13485 fis, clone PL | 2.00 | 908 |
| 432492 | AW275110 | | ESTs | 2.00 | 2673 |
| 440772 | AA905574 | Hs.197444 | ESTs | 2.00 | 3317 |
| 458342 | AI003931 | Hs.334583 | ring finger protein 23 | 2.00 | 4619 |
| 453666 | AW015681 | Hs.135229 | ESTs, Weakly similar to A2BP_HUMAN ATAXI | 2.00 | 4422 |
| 409988 | N27687 | Hs.334334 | transcription factor AP-2 alpha (activat | 2.00 | 426 |
| 444430 | AI611153 | Hs.6093 | Homo sapiens cDNA: FLJ22783 fis, clone K | 2.00 | 3597 |
| 458422 | AI344782 | | DnaJ (Hsp40) homolog, subfamily C, membe | 2.00 | 4624 |
| 434636 | AA083764 | | hypothetical protein MGC3178 | 2.00 | 2856 |
| 408504 | AW205908 | Hs.73614 | ESTs, Weakly similar to 2109260A B cell | 2.00 | 274 |
| 418403 | D86978 | Hs.84790 | KIAA0225 protein | 2.00 | 1197 5015 |
| 418496 | AI564857 | Hs.27888 | ESTs, Weakly similar to serine/threonine | 2.00 | 1207 |
| 416742 | R38644 | Hs.248420 | ESTs, Moderately similar to A47582 B-cel | 2.00 | 1019 |
| 442333 | AI650877 | Hs.129302 | ESTs | 2.00 | 3422 |
| 425147 | AW291265 | Hs.334636 | hypothetical protein MGC2615 | 2.00 | 1929 |
| 415642 | U19878 | Hs.336224 | transmembrane protein with EGF-like and | 2.00 | 4951 941 |
| 414684 | AW630023 | Hs.76893 | 3-hydroxybutyrate dehydrogenase (heart, | 2.00 | 863 |
| 453354 | W55946 | Hs.234863 | Homo sapiens cDNA FLJ12082 fis, clone HE | 2.00 | 4399 |
| 442007 | AA301116 | Hs.142838 | nucleolar phosphoprotein Nopp34 | 2.00 | 3387 |
| 434326 | NM_005619 | Hs.3803 | reticulon 2 | 2.00 | 2828 5546 |
| 456487 | AF064804 | | suppressor of Ty (S. cerevisiae) 3 homolo | 2.00 | 4545 5799 |
| 443767 | BE562136 | Hs.9736 | proteasome (prosome, macropain) 26S subu | 2.00 | 3549 |
| 414569 | AF109298 | Hs.118258 | prostate cancer associated protein 1 | 2.00 | 845 |
| 419829 | AI924228 | Hs.115185 | ESTs, Moderately similar to PC4259 ferri | 2.00 | 1362 |
| 448360 | AL117560 | Hs.306352 | Homo sapiens mRNA; cDNA DKFZp566P2324 (f | 2.00 | 3959 |
| 410025 | BE220489 | Hs.113592 | ESTs, Moderately similar I54374 gene | 2.00 | 432 |
| 436961 | AW375974 | Hs.156704 | ESTs | 2.00 | 3023 |
| 443823 | BE089782 | Hs.9877 | hypothetical protein | 2.00 | 3555 |
| 436887 | AW953157 | Hs.193235 | hypothetical protein DKFZp547D155 | 2.00 | 3018 |
| 421808 | AK000157 | Hs.108502 | hypothetical protein FLJ20150 | 2.00 | 1565 5122 |
| 418375 | NM_003081 | Hs.84389 | synaptosomal-associated protein, 25 kD | 2.00 | 1192 5012 |
| 446565 | D13757 | Hs.311 | phosphoribosyl pyrophosphate amidotransf | 2.00 | 3763 5671 |
| 450737 | AW007152 | Hs63325 | transmembrane protease, serine 4 | 2.00 | 4157 |
| 433184 | AA147979 | Hs.285005 | mitochondrial import receptor Tom22 | 2.00 | 2746 |
| 427621 | BE621182 | Hs.179882 | hypothetical protein FLJ12443 | 2.00 | 2173 |

[0371] TABLE 12B

| Pkey | CAT number | Accession |
|---|---|---|
| 428342 | 6712_1 | AK056315 AI015524 AA724079 BI713619 AI377728 AW293682 AI928140 AI092404 AI085630 AA731340 BM469629 AW968804 AA425658 AA769094 BF446026 AW118719 |
| | | AI332765 AW500888 AW576556 AI859571 AW499664 AW614573 AW629495 AW505314 W74704 |
| | | AI356361 AI923640 AW070509 AI521500 AL042095 AA609309 AA761319 AI381489 H45700 AA761333 AW265424 AA909524 AA635311 |
| | | AA649040 AI392620 Z40708 AI985564 AW263513 AA913892 AI693486 AW263502 AI806164 AW291137 BI061872 BI059498 AA134476 |
| | | AW084888 AA036967 AW370823 T55263 BI002756 AA489664 BF827261 W74741 BF963166 |
| 412446 | 63467_1 | BC021735 AI669212 AL120184 AI769949 BE701002 BE184363 BE819031 BG702238 BF090049 BF963318 BF961912 BF943013 |
| | | AA934514 AA151245 BF960659 AA987907 Z41449 BF908059 BF908053 BF908049 BE699424 BF908060 BF962832 BF952020 BF963134 |
| | | BI035538 BF908052 BF908057 BF090026 BF943158 AI632924 BF512340 BF952021 BF960776 BF943437 BF942847 AI768015 F09778 |
| | | F04816 F02721 AA102645 AI633838 AA617929 BF947001 BI035448 BE935876 AW890837 AW898604 BF957405 BF963433 BG704815 |
| 447329 | 9170_1 | BC001573 AK074197 AW967044 AW360965 AW612048 AI765501 AA112034 BI859391 BI334670 W63553 AV706135 AW024203 BI194441 |
| | | AV655141 AA316041 BE280583 BG428780 BE267060 AV648926 AA317168 BI222294 BG437688 BE709273 AI951240 AI611162 |
| | | AW970792 H89338 BE543309 AL036038 R26941 BI765176 AA209487 AA111975 AA086463 AW192209 AW025245 BF511894 AW264490 |
| | | AW014985 AA947336 F15843 BI335083 AA563626 BE546579 AW470009 AA083693 BE090517 BF970294 BG427898 BE541527 |
| 451807 | 17758_2 | BM479185 AL552795 AL577722 BF038888 BM127617 BF510346 AW450652 AA865478 AW449519 BM127314 AI806539 AW449522 |
| | | AA993634 AI827626 AA904788 |
| 449349 | 852_3 | BG679689 AW856638 BM016319 BE327123 AW772128 BE693337 BE938262 BG013928 BF892774 BF894765 BF892588 BF890995 |
| | | BE155056 BE153569 AI934407 BE672538 AW204203 AA778306 BE502974 AI718504 AA778312 AW008224 AW299732 AI911561 |
| | | AI867457 AI521962 AI640173 AI823832 AI288888 BE467960 AI934441 AA483527 AW612103 AI802712 AW342106 AI580299 AW083293 |
| | | AI700874 AW469932 AI583726 AW302136 BE327360 AW614404 C02300 AA934834 F29737 AI262050 AA934619 AA535965 BF196507 |
| | | AA393480 BF086615 AI825386 AA009773 BI333272 T93614 AW770207 BF766665 T64641 W92713 R94110 T89897 BF086603 T93659 |
| | | AA001207 BE539257 BE541430 BE160783 BE155304 BE155454 BF891405 BF762818 |
| 429228 | 215430_1 | BG676155 BM009591 AI479075 AI025794 AI017967 AA448270 BE466812 AA853422 AI392649 BG952034 AA513384 BF840124 BE714620 |
| | | AW969605 AI553633 |
| 411605 | 10026_3 | BG256892 H10532 N46614 R52610 AW977696 BM460488 W56819 BI042183 BG977498 BE767451 BF870009 BG477472 R61137 R14274 |
| | | R20259 R09686 BI838226 BF034269 AA429173 BE741829 AW867495 AI123683 AW006831 BE831162 AW452753 AV742717 W86152 |
| | | BF115102 AI633815 BF921562 AA094230 BE092587 W86151 AA526153 AI672156 BF914496 R12579 BF852352 AA699780 T57386 |
| | | BF903022 R09933 AA678298 |
| 451752 | 10408_5 | AB032997 AI141678 AW978722 BE467119 AI761408 BF727385 AW237035 AI934521 BF436248 AI479668 Z40632 AA832081 AW295901 |
| | | BF057835 BE465977 AI621269 BE465983 BF756369 N74056 AI817896 AA716567 AA934774 H62600 H09497 BF943762 BE395335 |
| | | BE883333 |
| 444172 | 49300_2 | BF526827 AA513594 AL515291 AV648373 AV648176 AA916789 BF002906 AW469960 BE466943 AI367749 AI559715 BF431260 |
| | | AA937968 AI422252 AI288937 BF962778 AA909144 BF960004 BE671534 AI271719 BF925335 BE669504 BF433431 BF924838 AI218062 |
| | | AW960577 AV722716 BI859067 BF944964 BE147740 BF938993 |
| 400205 | 2538_1 | NM_006265 D38551 X98294 BM477931 BM461566 AU123557 AU133303 AU134649 AW500421 BM172439 AW500587 AW503665 |
| | | AW504355 AW503640 BM152454 AW505260 AI815984 AW504075 AW500716 AL597310 BC001229 BM474371 AA984202 AU135205 |
| | | BE090841 AW163750 BF747730 BF898637 AI206506 AV660870 AV692110 AW386830 AV656831 N84710 AW993470 BF086802 |
| | | BF758454 BG960772 BF757769 BI870853 BE018627 C75436 AW148744 BF757753 BG622067 BE909924 AA708208 BG530266 BF968015 |
| | | AW992930 BF888862 BG536628 AA143164 AW748953 BG498922 BF885190 BF889005 BF754781 BF800003 BM476529 AI627668 |
| | | AW028126 AL046011 BF590668 AI017447 AA579936 AI367597 AA699622 BE280597 AI124620 AI082548 AW274985 AA677870 AI056767 |
| | | BE551689 AA287642 H94499 AI752427 AI652365 AW002374 AW062651 AA360834 N68822 AU135442 AU125960 Z78334 BE545813 |
| | | AI092115 BF312771 BF242859 BG533616 BG533761 BG164745 BG492433 BM473183 AA172043 AA172069 AU157092 AU151353 |
| | | AU155318 BE302211 AI375022 AA085641 AU157923 H88858 AA132730 AA115113 AA909781 AI475256 AA424206 AW572383 AW084296 |
| | | AI184820 AI469178 AA782432 H92184 AA340562 BF195818 AA852821 AW576342 AA827107 AA173317 AW190014 AI918514 AA729372 |
| | | AA729718 AI055958 AA331424 BE328601 AA515690 BI018896 AW628277 AA748368 AA626222 BG492636 AW380620 BF800058 |
| | | AW370956 AA290909 R25857 BG952995 BF801437 AA172077 AU155890 AU149783 AI720904 AA902936 AA865727 AI470830 AV740677 |
| | | AA142982 AA482485 AU145485 AW576399 AU156042 R63448 BF246427 BE928472 D25910 BF758439 BF968785 BE565238 AA355981 AI905607 BG291148 BG533096 |
| | | BG532888 BF030886 BG613756 BE928471 BG574501 AA187596 AA361196 T95557 BG531446 |
| | | BG527242 BG527513 BG611106 AA085995 BF847252 BG024608 BE540261 BG531236 AL579993 BG108733 BG483503 BG571032 |
| | | BG492505 |
| 419631 | 2743_1 | BC022323 AF204171 NM_022361 BM264431 BE670789 AW188117 AI025298 AA861832 H84897 AI382294 AA662874 AW993380 |
| | | BE813742 H84368 AI188074 N20482 H84369 |
| 400277 | 170_1 | Y00281 NM_002950 BC010839 BC007995 BG675232 BM468552 AL555484 BG831516 BF035300 BG677277 BF852972 BE314901 |
| | | BF850656 AI371816 AA292474 AA375747 AA308414 BM454544 BI333370 BM049921 BI461428 BI465007 BI223401 BE856245 AW821164 |
| | | BF914775 BF914761 AU125835 BI222678 BI091137 BF340536 BM462798 BI224452 BG707915 AL569160 AA443815 AW572867 |
| | | AW363410 BF739268 BG010283 BI013120 BF818845 BF763468 AA305165 AI630370 AA039826 R24906 H02046 T96891 BF981330 |
| | | AW936510 AA478169 H04587 BG166574 BI869342 BE562482 BE539637 AA165089 AL579118 AL553699 BE044054 AW117440 AI520674 |
| | | BF435417 AW245648 AI952404 T29534 AU153459 AU152168 AW591591 AU146918 AI393187 AA478013 AU148143 AI224471 AI640728 |
| | | AI871537 AW264752 N93787 AI189357 AV756134 AI471659 AU147466 AA779206 AU149419 AU149104 AU159135 AA312221 AW445119 |
| | | AW021912 AI799771 F04407 AI285530 AI914643 AW068751 AA513325 AA164627 AA639285 AA569644 T96892 AI923594 BF439180 |
| | | BI770936 BF032438 AU154884 AA682793 AW072992 AU158815 AI884444 AL048031 AU158922 AU152546 AI695187 AL048033 AI245650 |
| | | AU148507 AW467451 BE536868 BF913001 BF062707 AL573082 AW067993 AA523354 BE886727 AI890705 AU159092 AI982693 |
| | | AI817553 AA236729 AI687858 BG163767 AI524675 AI678155 AA127100 AI762661 AU159718 AI469720 AA483627 AW131696 R26868 |
| | | AI199885 AW875614 AW938694 AW578974 BI763988 BG819168 BE874767 BG978292 BE162948 AL555483 AW189719 T56783 AI018819 AI476552 BI492837 |
| | | AI824440 BG996262 AA932887 AI380726 R79530 AA622108 AI262575 T56782 R27437 BE784153 AW129549 |
| | | AI675567 AI866759 BG987935 |
| 449444 | 2735_1 | U59185 NM_004696 AV734324 AI245349 AA369517 H88760 D79128 AA970406 H01059 H88761 H03446 BG620383 AU135008 AU136895 |
| | | AU158158 AU155762 R73608 R65751 R23756 N74630 AW078687 BE439761 BE786351 R68994 BE785867 AW297502 AW297553 |
| | | BG431545 AW814843 BF382644 BG429539 BE929862 BF811258 |
| 442961 | 60316_2 | BE966247 BE220885 BE467384 BE350135 BE672094 AI811582 AW665254 AA772731 AI283601 AA417067 AW197746 AI868357 |
| | | AI792143 AA931120 AI758506 AA843761 BE737582 AW379586 N38812 BG567321 H13257 |
| 443695 | 20416_12 | BE535598 AW204099 AW301249 AA609749 BF917914 AA775742 AV646137 AV646389 AA314747 |
| 422150 | 782_1 | BI086421 BF059136 AW003898 BF446659 AI632891 AI628067 AI703179 AI961149 BF111022 AW614154 BE674215 AA687350 AA779426 |
| | | BF591963 AW243344 AI356530 AI492508 AI694049 AI090422 AA465307 AI273387 BE674625 AW271971 AA969153 AW468593 AA984014 |
| | | AI817491 AA970258 AI914450 AI018697 AW577591 AW577616 AA382101 AW954455 AI867266 AI707995 AI337384 BF208406 BF037100 |
| | | BF223433 BF195517 BE673984 BF224124 BE813387 BG036579 BI553906 AA304995 AW361269 AW754160 AW361276 AW361271 |
| | | AI867118 AW805555 AW361284 AW954458 AW958551 BG681507 H79011 AW205696 AW134957 AA747667 AW753296 BF939060 |
| | | AW958549 BF910827 BG573750 BG168639 |
| 437834 | 294580_1 | BG110129 AW749287 BE535498 AW749299 AW749293 AW749302 AW749298 AW749291 AW749294 AW749289 AW749288 AW749296 |
| | | AA769294 AW749297 AW749295 AW749292 BE002573 |
| 439574 | 689966_1 | BG532820 AW246001 AI469788 AI350090 AI446788 BE549330 W84862 AA837988 |
| 433023 | 3970_8 | BE999967 BF438599 AW864793 AI802899 BE815132 AW468888 AI672189 AI052004 BF112024 AA772335 AW275054 AA573845 |
| | | AI144148 AI968683 AA846676 AA927355 H80424 AW973295 R88209 F29868 BE928871 |
| 407198 | | |
| 447349 | 1063443_1 | BE743847 AW809603 BM469626 AI375546 |
| 458098 | 23945_1 | AI082245 BE467534 AI797130 BE467063 BE467767 BE218421 AI694996 BE327781 BE327407 BE833829 AA989054 AA459718 BE833855 |
| | | BE550224 AA832519 AF086393 AV733386 BE465409 N29245 W07677 AA482971 BE503548 H18151 AA461301 W79223 W74510 |
| | | AI090689 AL600773 AL600781 N46003 R28075 R34182 BE071550 AW885857 AI276145 AI276696 H97808 N20540 AI468553 |
| 430935 | 15297_3 | BC017923 AA789302 AW466994 BF513878 AI819642 AI184913 AW469044 AI220572 AW072916 AI280239 AI473611 AW841126 D60937 |
| | | AA489195 N59350 AA693435 BG531204 AA484243 AW514092 |
| 412537 | 14066_1 | AK025201 AA425472 AI694282 BG057305 AA907787 AI286170 AI684577 AJ420494 AI809865 BF058095 AI478773 AI160445 AL044114 |
| | | AW665529 AI129239 AW297152 AI268215 AI469807 AI969353 BE552356 N66509 AA736741 AA382555 AW075811 AV759188 BI259364 |
| | | BF445142 BG232065 AI141758 AI631202 AI167566 AI208445 AA889823 BF982682 N90322 BI090882 BF208005 AW953918 AL044113 |
| | | AI016793 AA382556 AW235763 AA927051 AI862075 BE886691 BE619282 |
| 414770 | 41721_1 | AK056926 BG473673 BG482256 AL135566 AW419211 BF949370 AL120313 AV703730 H82569 BG012696 R27084 AA304583 BM452908 |
| | | BF516419 BF515687 BG036572 BG696740 AW953552 AW859437 AA306038 AI754064 AA608729 AA664163 H65119 AW272606 |
| | | BF942099 AW130468 BI089467 BG821499 AA152403 BF310450 BF314240 BG830310 BF803223 BG764269 BE542645 BE259142 R26953 |
| | | BE257224 BG475461 BF677821 R33048 |
| 438714 | 2576235_1 | AA814859 AI582623 AA814857 |
| 432339 | 57992_1 | BG823745 AW411259 BG111139 BM041741 AW015049 AW068953 AW014085 AA969360 AI027260 AI948416 AW015886 AA918278 |
| | | AA705292 AA702483 AA534205 BE856934 AI129462 BE926765 AI684275 R52686 N34869 H23555 |
| 438869 | 52134_1 | AF075009 R63109 R63068 |
| 431912 | 610_10 | BI763666 BI517886 BI759051 AI688604 AI660552 BF588523 AW004785 AW295479 BF591117 BF002672 BF064073 AA594441 AI380340 |
| | | AI700219 AI659950 AI688540 AW296326 |
| 450251 | 40382_4 | BE080483 AI689298 BE080416 |
| 412452 | 71091_1 | BE796667 BF330981 BE394193 Z45547 BG490525 F35734 AA130708 AA577072 AA446587 AA215665 AA978209 BG740729 BG746810 |
| | | BE298184 AI356291 AI671975 AI818924 AV715722 AI078381 BI142391 AI201085 AI198283 AI077572 AI694848 AW016425 BM456416 |
| | | AI277223 AW771476 F26140 AA102778 AW025780 R44726 AA761079 AI581346 AI991909 BM005939 BE537999 BG469717 AA114156 |
| | | BF437200 BE774942 |
| 418259 | 133853_1 | BM310925 AA426110 BM310629 BF434286 AW015091 BF475996 AW118867 BE675186 AI688568 AI453594 AW590589 AI652425 |
| | | AI827969 BF056946 AI802866 AI393380 AI476224 AW590639 AW136271 AI458252 AI524726 AA843768 AA782158 AI336058 AI097532 |
| | | AW451563 AA459408 AA459633 AA418444 W23607 BG940150 AI493445 AW054729 AI221929 AI868744 AA215405 AA766713 AA621546 |
| | | BF928317 BE464132 AI990909 AW271459 AI262061 AA215404 N74332 BG940151 BG952261 AA972115 W96315 AA689586 R69057 |
| | | BF766886 BE769254 W05240 |
| 452279 | 11990_1 | AF392454 AK023074 AI884890 AI814455 AW966220 BF736545 AA026021 AA286843 AA251918 BG197710 AA026294 AA337356 |
| | | BC010422 AK023226 NM_022776 BM459496 AA769310 AI826460 AU153650 AU160375 AW166211 AW292992 BF433538 AI823888 |
| | | AI684798 AI655985 AW770982 AI400454 AI276257 AA639510 AI689818 AW772604 AA807639 AU130298 AU132028 BF900889 BF904822 |
| | | AY007102 AU143256 BG621460 AA829630 AI864665 AI084922 AA025234 AI360060 AA766554 AA026295 AA825817 AA251762 |
| | | BE180751 BM464530 AV715833 AA779447 AI452519 AW418525 AA435643 D25894 AA435651 AA286844 N64369 AI702262 BG288063 BE170545 BM466232 BE299160 |
| | | AA169573 AL567428 BF217285 BE967276 |
| 449230 | 6182_6 | BC006329 AK026224 BG105365 AI472084 AW074277 AI743908 BM309990 BI850432 AI094365 AI539568 AW779999 AI261365 AA988975 |
| | | AI436272 AI559886 BI710742 AA988508 AA036678 AI867147 AW518513 AI620019 BE645777 AI801919 AW205320 AI457722 BF061996 |
| | | BF061798 AA233854 AA232795 AA516294 AA830561 R74220 BG768337 AW392972 BE764979 BE257665 |
| 413413 | 26025_3 | BG261240 BG231707 AI440201 BF540868 BF240794 BE779394 BG505096 AA129208 D82298 T10758 AU155599 BF857123 BF836348 |
| 446873 | 15731_1 | BC016767 Z30093 NM_001516 BI753904 AL555563 AL598882 BG706296 BG723901 AL600911 AW949486 AL602675 AL600169 |
| | | AL600111 AI373329 BF149149 AU099109 AL578036 AA410532 AA521208 BI018894 BI333338 AW269273 N79350 AW954400 AI760772 |
| | | AA765916 AW300373 AW628851 AW505118 AA506136 AW779373 AI675026 BE674159 AI241579 N51870 AI632936 AI796901 AI620962 |
| | | AA876979 AA886127 AA934448 H58689 AA373345 N78420 AA282406 N98953 N22575 N62381 AA805377 AV718946 AI421009 D20327 |
| | | AW518433 AI554439 BI027833 BG613441 BG573433 N66669 N62701 |
| 446999 | 70312_1 | AA151520 AI749635 AA149436 BE172702 AW317084 AA922501 AI302818 AI147563 AA789216 AI719336 AW612978 F34536 AI971386 |
| | | AI246525 AI183312 R02554 AI360172 AA634282 AI022935 AA639461 AI086411 AI087086 AA633082 AI590029 AA856582 AW369734 |
| | | AA150042 AA877171 AA456459 AI078529 R83333 AI161298 AA056987 AI350120 H88127 AA258759 AI673598 AA454566 AI342790 |
| | | AI492606 AI159945 AI198009 AI198039 AI142751 AI141403 T81478 AW014110 AI197808 AI927796 AA534936 AA649735 AA649697 |
| | | AI349452 AA719660 AW954285 |
| 458997 | 11847_4 | BM453041 AA760783 BE218582 AI340046 AW166131 BF515854 AI630296 AA461307 AI090881 AW023059 AA155797 AA115486 |
| | | AL597396 AW889004 AW937420 AA137082 AA013374 BG619478 BG401839 |
| 455019 | 186896_1 | BG339523 BG000719 BF913518 BG703361 AW851100 AW850833 BF802227 AW850818 BI088683 |
| 441128 | 20932_1 | BC014072 BE328850 AI356567 AI148171 AI022165 BG149661 BF000671 AA233101 AA573721 AA447991 AW016855 AI005068 AA554071 |
| | | BF478215 AA906902 AW014761 BE905651 BE512923 BM047129 AA243852 AA232991 AA127550 AA127551 AA570256 AI473237 |
| | | BF033706 N90525 AW973623 AI359627 BG674574 BE903322 |
| 455459 | 1174365_1 | AW947654 AW947665 AW947633 |
| 437866 | 34267_1 | U52054 AL581000 AA156850 AW293839 BI335865 AA024963 BF149420 BE073977 AW602574 BE164012 BE163992 BE163974 |
| | | AW402161 BM194134 AW966609 W84374 BF916380 AA385173 W84366 AA383743 BF903598 AA043776 W84421 AA778446 AW444904 |
| | | BF446960 AA837481 AV755539 AW468444 AW468002 AA811830 AA581806 AI866686 AI572124 AA687333 D20160 AA812489 AU185248 |
| | | AU186004 AA156781 AI536733 BM144850 AI471883 AA040926 BF507639 AA043777 AW874142 BE832523 BE163972 BI022546 BI021204 |
| 443687 | 1347_10 | H72674 BG925294 AA699932 BF061529 AI240821 AA676904 AI083582 AA766036 AA761066 AA761228 AV686983 AV646138 AV646121 |
| | | AW961968 AA004250 AV658573 T08315 AA004669 |
| 437204 | 28243_1 | AL110216 AI816283 AI688476 AA928351 AW157672 AI288740 BE468242 AI452476 AI291665 AW192364 BE503635 AW592672 AA857393 |
| | | AW162770 AI680660 AI879565 AI347717 BF880800 AI266646 AA834381 AI291667 AI264567 Z38449 T03352 AI929432 BE673697 |
| | | AI124770 AI350389 AA910378 R54042 AV746670 AW089037 AV729218 H28971 R38549 AI692560 BE671562 BE669916 BE672206 |
| | | BF445152 BF445151 AI914323 AI684406 AA932348 BE670597 AA932080 |
| 412314 | 17239_1 | NM_018971 AB040799 BF060724 BF061085 BF058335 BF446952 BE502582 AW051846 AW468602 BG507049 F12518 BE703222 T19393 |
| | | T32177 T74004 AA775876 BG370235 AA426547 AI857339 H08634 AW961071 AI703476 AW419310 AW118126 BF055108 AA931093 |
| | | AI298553 AI343013 AI168160 AA976583 AA622237 BE327125 W51947 AI056138 AA825247 AI348336 AA101674 BF222266 BE173228 |
| | | BG924257 F10138 AA757564 H08635 |
| 453160 | 6028_5 | BC009612 NM_003526 BI597616 AV761592 AV760377 AL601008 BI604131 BE645918 BG187760 BG181525 BG210634 BG192999 |
| | | AI263307 AA344186 AW952966 AA033609 AA037562 AA722183 R79452 H70775 BF674991 BE769437 BG007856 AA037483 AW572535 |
| | | AI143991 AA084581 AA033610 AV742510 AV735788 R08336 |
| 438118 | 1007899_1 | AA778411 AW663081 AW753311 |
| 430712 | 301999_1 | AW044647 AI670953 AI656180 AA484715 AI659205 BF923472 |
| 406685 | 0_0 | M18728 |
| 411261 | 1074276_1 | AW834670 AW834476 AW834691 AW834604 AW834655 AW834623 |
| 438697 | 1239615_1 | AW975849 AA814439 AI052090 |
| 449343 | 14470_1 | AK055378 BE896063 AV722833 BI032095 BF952019 BG547204 AI151418 W03542 W60401 AI346936 AA862855 W60310 N72501 |
| | | BF963436 C04881 H90060 AA001203 AI863984 AI932612 AI499771 AI187944 AA501896 AA714924 H00689 AA918680 AA573996 |
| | | AA521308 AW182868 BF996707 AA908959 AI628880 AW173363 AW665845 AA130178 AI818267 AI653663 AI828924 AA746655 AI951984 |
| | | AI635625 AI093113 AI377976 AI624029 AI418242 R76291 W92652 AI207798 AV706224 AA742467 AA641806 W61229 AA130170 |
| | | AA160170 H85007 W72474 W61163 H97873 AL047509 R76567 AA812071 H81599 AA021275 H85004 H85894 BG537537 BF830518 W76228 W46673 Z43839 R78710 C01747 |
| | | H00789 BI036345 W92828 BE150445 AW380821 AW173095 H85630 H81598 H86032 R84855 R13223 AA774992 |
| 424036 | 6226_1 | NM_033445 BC001193 AI885781 BF794032 AA476620 AA810906 AA810905 AI291244 AI885097 AI359708 AI335629 H97396 AI344589 |
| | | AA300377 AA457566 AW771833 BE465621 AI364068 AI364452 AI648505 AI918342 AI928670 AA886580 AL531029 AA886344 AI186419 |
| | | BG329096 BM045465 AL531028 BG437151 BE868021 AA179427 |
| 452598 | 2741_1 | AK055715 AI129800 AW027959 AI927949 AI650270 AW514661 AI708393 AL138076 AI926721 AA749139 AI399955 AW874011 AI302816 |
| | | AI242763 AA828301 AA262795 AI093249 AI084565 AA904444 BE245661 AI810709 N30447 AI653617 AI289975 AI474418 AA737455 |
| | | AI619613 AA291708 AI640264 N91446 AW029069 AA680378 AA338773 BC022321 BM450359 BE439944 AA521348 AI066761 AL138075 |
| | | BM153113 BM153112 AW182953 BM147809 AI247395 AI911116 AA977587 AA291690 AI243777 F35824 AA579199 BM479711 AW961031 |
| | | H92980 H86861 AA026904 AI052445 R92739 T10789 AV749986 AL540531 AA452953 BM152599 AA382769 BI550695 BG432646 |
| | | AV744808 |
| 441420 | 2361943_1 | W28068 T96110 AA932872 W28643 |
| 447832 | 1036795_1 | AI628543 AI433357 AW772732 |
| 440282 | 21425_1 | NM_021188 U90919 BM458077 BG214941 AL562127 BG197712 AW994207 AA043114 AW993474 AA631832 AI911529 BI001014 |
| | | BE156322 BG319454 H27376 BG220618 BG189474 BG325006 AL519085 BM472894 AL520560 BG575806 AA319317 BG621802 |
| | | BG912722 AV760869 AV760871 R13243 BE274097 BG327062 BI765172 BE614338 BG214923 BM153391 AU147675 N58119 AL043557 |
| | | AL043558 AL043510 AA773474 AU148079 BF062869 AW189972 AW250398 AI028605 AI434688 AW149344 AI246783 AI961376 AI698209 |
| | | AA251535 AU160747 AA579811 AI572570 AI656228 AA426093 AA127171 BF222487 AA725576 F21161 AI932217 BF222251 AI024660 |
| | | AA780998 AI538862 AW140038 AI122909 AA493515 AA401920 Z39789 F10942 F05081 AA814868 F10376 AA776314 AA993104 T94991 |
| | | AW583990 AA128211 F03074 AL579261 AL519084 AA384895 BG196670 AW083526 BF220181 BE669988 BF907279 T23499 AL520559 |
| | | AU149005 N38766 H96506 AA040865 AI263737 AA723350 AI168145 AA652386 AI374699 AA487377 AI927374 AI985531 AI352105 |
| | | AI040092 AA486562 BM053020 Z41738 BE243710 AA601558 BM052743 AI445827 AA487260 AI982679 AW130546 AI743384 AI335647 |
| | | AW978172 R40324 AV736436 BE966360 AI185467 AI367193 N75025 AW131068 BE940519 H43910 AA486659 BE614365 BF220261 |
| | | BE181357 BG189473 BG210176 H43958 |
| 434804 | 118455_1 | AA659316 H64973 AA649530 |
| 427521 | 513212_1 | AW973352 BF222929 AW016853 BF059130 AI651829 BE551767 AA558414 AI339359 BF059601 AI961162 AI341422 AI206248 AI206165 |
| | | AA548736 AA768578 AI539081 AW025957 AA736837 N79575 AW594357 AA480892 |
| 455416 | 1164250_1 | AW937150 AW937151 AW937141 AW937174 AW937132 AW937173 AW937170 AW937165 AW937195 AW937145 AW937164 AW937137 |
| | | AW937160 AW937142 AW937171 AW937191 AW937139 AW937143 AW937159 AW937140 AW937163 AW937135 AW937179 AW937156 |
| 453454 | 2736_1 | BC001588 BC007424 AF016369 NM_004697 BI756186 BI257019 BG500792 BI862776 AL121371 BG574833 AA703250 AA179511 |
| | | AW052006 AI280150 AI914000 AI358319 AI081204 AI082594 AA992449 AI470821 AI655744 AW237529 AA678858 AI984430 BF433055 |
| | | BE467594 BE467573 AA035630 AI289987 AI184802 AI681391 AW592416 AI138377 AI139266 AA961714 AI800163 AA418751 AW451928 |
| | | AA668676 AI273444 AI494387 BE046912 AI276555 BF196021 AA700055 AA609305 AA772596 AI635758 AI635749 H95459 AW610290 |
| | | BE464994 AA527136 BF374802 AI800175 AW195227 AI189676 BF802049 AL513632 AL554911 AL538845 BE297273 AA315321 |
| | | BM451920 BE269268 BE292835 BE018128 BG755713 BM041095 BG677009 AL039691 BF995709 BE735586 BE296453 BG393609 |
| | | BG824453 AL567522 AI745257 AW388641 AW301265 AI141144 AW029280 AU149362 AU152328 AA418960 AL121009 AI890398 AL528748 H13050 T47086 BI000575 |
| | | BF334914 BF109661 R44450 H13259 T47087 AW388646 BF305834 AL577515 BM041600 BE889299 |
| | | BF239768 |
| 438989 | 1242606_1 | AW979100 AA829131 AA828926 |
| 454731 | 1069368_1 | BE067650 AW817053 BI000539 |
| 455751 | 1497052_1 | BE075281 BE075119 BE075123 BE075219 BE075046 |
| 408673 | 13031_1 | BG027435 BF746745 AF349017 NM_052963 AL553524 AL519055 AL525199 AL529016 BE208517 BI856042 BG480978 BE267120 |
| | | AW815679 AL525198 AL561760 AA933030 AA634332 AA568280 AA927487 AW182340 AW592604 AW732157 AI680072 AI431328 |
| | | AI357601 AI872335 AI032112 D25780 AL529015 AL576497 AA575842 BG223081 AA618007 BF310845 BF757605 BM012536 BI911537 |
| | | BE964237 |
| 440546 | 631538_2 | AA889258 AW139809 AI700895 AI491994 |
| 434438 | 111581_2 | AI654867 AW236852 AW236558 AA747964 BE843851 |
| 445138 | 2047826_1 | H97479 AI214273 H99085 |
| 412122 | 3941_2 | AK056423 AW070901 BG222419 BF928848 AL567752 AW770702 BE160226 AW248894 AI304851 AI090802 BF514704 AI659696 |
| | | AI762084 BE018718 AI088023 BF876482 AA283824 BF742200 AI349494 AI942345 AL576641 BG959608 AA853964 AA854927 AA767839 |
| | | AI955028 BG611080 BI497416 AW947186 AI703492 AW612137 AI696372 BM016022 AW852632 N57282 BI859575 AA100379 AI879394 |
| | | AI653605 BM459051 AI446574 BG031916 BI004602 BM014817 AA725075 BE063022 BG741166 BF088949 AI937125 AW936878 |
| 437158 | 59575_1 | AL050068 AA160485 AW173544 AW296506 AW439860 AI521563 AI702529 AI393606 AW138323 AA570109 H19504 BM021968 BF063327 |
| | | BF593552 AA630766 AI597717 AI807128 AA523012 AI356250 AW451857 AA974203 AI762577 BF512552 AW007307 BE675286 |
| | | AW450602 AA962057 AW516069 AI582546 BF221924 BF222543 AI801808 AW468599 AW000736 AI866625 AW235356 BM021837 |
| | | AA911956 AI680606 W86516 T03370 AW611634 H41653 AI468349 H19588 AW090198 AW043993 R39847 |
| 442092 | 22756_2 | BM449821 BM069895 BM023170 AW025563 BG152606 BM023452 AI862106 BG959957 |
| 450687 | 82562_1 | AA010736 AA495800 AA640726 AA654716 AA495737 |
| 441318 | 1989216_1 | AA928233 AI078234 AI702558 H81727 |
| 433553 | 11940_1 | AL583707 BM013793 AA765477 AK025032 AL582648 BI761445 AW977217 AA700263 H65650 AA309842 BM020355 BM449517 AI752899 |
| | | BE677851 AL121362 AI955600 F11510 BI861721 AI022695 BF154943 BE081847 BM046024 BE883957 BG109038 BF593817 AA825523 |
| | | AA744888 AA825246 AA973546 AA599107 AW173711 BE550926 R40586 |
| 410507 | 4450_2 | AK027433 AF117064 NM_013319 BC004468 AI149901 AI150093 AI374696 AI566580 AA779898 BG696067 BG828923 BM051241 |
| | | BM050350 AL580560 AL558826 BG182261 BG194259 BG194258 BF036155 AI026803 AI024570 AA702281 AI566953 AW662600 |
| | | AA463546 F33147 AA357796 BE312357 AL516788 AW958856 BE730432 H85868 AA046292 BG478025 BG112231 BG763623 AA098922 |
| | | BI093481 BE746381 AW962126 AI040821 BG026983 AA355288 BE392859 AA085571 BF875433 BF316280 BG740116 BG166624 |
| 414388 | 750506_−2 | BE281412 |
| 433090 | 7504_2 | AB038318 BC008888 BE905346 BE301941 AA705936 AW014954 BE378742 AI720050 BE395327 BG951204 |
| 400183 | 48154_3 | X80199 NM_007359 BI553784 BG720095 BG899766 AI088926 BE857470 AI199713 AI870291 AL121179 AL577898 AA009896 AA868181 |
| | | AA482924 AI637524 AW043834 AU156777 T30547 R05481 BE902481 AW372677 W73547 H51965 BF944628 BE825156 AL567238 |
| | | AW372714 BF759809 AL578496 BE396176 H02384 BE007647 BF917244 |
| 455286 | 1149378_1 | W27935 AW887403 AW887474 BE144384 BE144386 |
| 451378 | 1524483_1 | BE153447 BE153429 |
| 455440 | 1172091_1 | AW946022 AW946090 AW946040 AW945962 AW945979 AW945971 AW945960 AW945956 AW946031 |
| 412560 | 72553_1 | BF002870 AI003925 AI082639 AA194383 AA702993 AI767866 AL575096 BF593252 AI948584 AI678666 BI963722 AI765219 AA620965 |
| | | BE671938 AI004689 AI004690 AI990303 AI127228 BE856290 AW203978 AI934786 AI770075 AI144132 AA812597 AI813349 AI142908 |
| | | BE671242 AI208243 H82735 BF115200 AJ345984 BE044308 F32992 AJ346047 F24958 AJ346565 AJ346456 F18071 R24502 BI830577 |
| | | BI222716 H83611 AA507760 BE463806 AA194467 AI865963 BF434962 C04894 AA813511 AA112966 N89963 |
| 456564 | 5823_1 | AW369406 AW747802 AW991351 AW747815 |
| 417879 | 2158126_1 | BF061412 R22451 R22128 R33566 |
| 434698 | 116401_1 | BE044674 AA643497 AA643491 BF935026 BF746059 BF908549 BF907921 BF908551 BF908547 BF907923 BF907919 BE044737 |
| | | BI017933 BG952887 BI017769 BI017771 BI017932 BI017767 |
| 418304 | 1093209_1 | BE883520 BI057842 AA215702 AA215703 AA368006 BE006876 BE066555 |
| 452480 | 3144986_1 | AI903574 AI903572 AI903526 AI903571 |
| 442643 | 2736_1 | BC001588 BC007424 AF016369 NM_004697 BI756186 BE257019 BG500792 BI862776 AL121371 BG574833 AA703250 AA179511 |
| | | AW052006 AI280150 AI914000 AI358319 AI081204 AI082594 AA992449 AI470821 AI655744 AW237529 AA678858 AI984430 BF433055 |
| | | BE467594 BE467573 AA035630 AI289987 AI184802 AI681391 AW592416 AI138377 AI139266 AA961714 AI800163 AA418751 AW451928 |
| | | AA668676 AI273444 AI494387 BE046912 AI276555 BF196021 AA700055 AA609305 AA772596 AI635758 AI635749 H95459 AW610290 |
| | | BE464994 AA527136 BF374802 AI800175 AW195227 AI189676 BF802049 AL513632 AL554911 AL538845 BE297273 AA315321 |
| | | BM451920 BE269268 BE292835 BE018128 BG755713 BM041095 BG677009 AL039691 BF995709 BE735586 BE296453 BG393609 |
| | | BG824453 AL567522 AI745257 AW388641 AW301265 AI141144 AW029280 AU149362 AU152328 AA418960 AL121009 AI890398 AL528748 H13050 T47086 BI000575 |
| | | BF334914 BF109661 R44450 H13259 T47087 AW388646 BF305834 AL577515 BM041600 BE889299 BF239768 |
| 459010 | 84453_1 | AW955786 BF870627 AA251104 AA331438 AA016068 Z19751 |
| 445008 | 781781_−1 | AI204903 |
| 416612 | 1980152_1 | N77403 H70565 H67949 |
| 416946 | 6767_3 | NM_016431 AF218778 AA322904 AA323084 AA323870 AA323104 BE263071 BE703587 AA351451 BE621564 AI377280 R22305 |
| | | AA974560 AA507924 AA972825 T16799 AA932063 AA722149 N53101 |
| 429978 | 35194_2 | BE738425 BE738323 BM126944 AW629678 AW265195 AI916735 AI394255 AI573090 AI354442 AW612857 AI339558 AI919424 AI377532 |
| | | AI354441 AI308821 AA772275 AW055215 AI589705 AI336532 AA806547 AV682125 H93575 AW071172 AW769904 AI863985 AW265018 |
| | | AW196655 D79662 BE042393 N75017 AW014741 C75509 BE748621 H92431 AW079261 AW901780 AA329482 AW960115 BI260621 |
| | | AI767525 R31663 BI918664 AW963196 C06195 AI678018 |
| 422259 | 140437_1 | BF821471 AW795791 BF844843 BF821371 AA307584 AW795790 BF833724 BE154067 BE064709 |
| 455236 | 1141653_1 | AW876000 AW875983 AW875972 AW875974 AW876050 AW875966 |
| 416128 | 3761_6 | AK057803 BG944795 AW411505 AW949210 BI018336 AI366964 BE165417 AA173988 BF965882 AA581362 AI002701 AA340708 |
| | | BF762925 BE005389 |
| 419544 | 236329_1 | BE787623 AI909153 AW362351 AW362269 AW362245 AA526337 AA244193 BF876842 R79395 AI909154 |
| 437147 | 3159_1 | AL049964 AW271733 AI417637 BF477833 AA890056 AA987650 AW269859 AW467559 AW952590 AW952591 BF197902 AI700840 |
| | | AW022147 AA335567 BM129024 AA336182 AA760676 R10321 AW450329 AI027902 AI536762 AV682039 R82056 N90743 BM068840 |
| | | T72673 AI224593 AI627551 H57901 R72123 R82002 AA180435 |
| 442562 | 39593_1 | AK056685 BG399272 AA187835 BF821903 AV660550 AV660556 AV660502 BG564397 BE379584 BF446961 AI653056 AW973709 |
| | | AI653173 BG054997 AI266043 BI054879 AI656750 AI492830 AW021142 AI472184 AW170056 AI082443 AI167921 D59940 BI492088 |
| | | H74180 AW130886 AI348677 AI278577 AA761517 AI698203 AA115535 AI264790 AW205074 AA860452 AA554902 AI000715 D62102 |
| | | BE544768 AI376090 D59939 AW242249 AA525421 R34211 R34328 BF248064 BF241437 BF572759 BF218832 |
| 437341 | 2493968_1 | AA809353 AA749062 AA825757 |
| 454453 | 8582_4 | BF313069 BE879305 AW752781 AW752727 AW752559 AW752578 AW752584 BF846118 AL545903 BF846115 AL525361 |
| 442476 | 2694863_1 | AF069477 AF069476 AF069475 |
| 451958 | 71947_1 | AK054586 AL526339 BG257506 AW303347 AA594114 AA770237 AW117421 AA992677 AI028634 AA947172 AI242148 AA641234 |
| | | AL574323 AI219861 AI806256 AI033441 AA532785 AA905552 BE908245 N56134 H28597 R00255 AA969941 AA515532 AA887328 |
| | | AW104956 AI825261 AW207328 BE552249 AL562032 BI459483 BF447646 AW341155 |
| 441181 | 31840_3 | AK027315 NM_032472 BG195928 BG940337 AA742244 BG195277 AA424400 AA812029 BG220715 AA416925 AA724544 BG755237 |
| | | BG489761 BG340645 BE696471 |
| 415889 | 12922_1 | NM_052918 AF284756 BE019093 Z42986 BE328250 BE207835 R54516 R24563 H08127 BI522616 AA551620 H07879 AI174481 BF941262 |
| | | BF222810 R54417 AW137766 AI638502 N22373 H08128 R44366 AW272405 AI675836 Z38786 N75618 F02463 AI654047 BI492031 |
| | | AW021081 |
| 441102 | 25369_9 | AK054859 AA973905 AI299888 H63235 AA917019 AV722171 BE514107 BM051585 BE513744 BE295938 W32901 AA649212 |
| 421342 | 267584_1 | AA504749 AA287498 |
| 441057 | 1565090_1 | AI187760 AA917993 AA913608 |
| 412988 | 1342150_1 | BE046680 BE046738 BE044958 |
| 421582 | 13358_1 | X00474 NM_003225 X52003 M12075 BI765761 AW950155 AI571948 BI760569 AA308400 AA568312 BI761955 AA507595 AA614579 |
| | | AA614409 BF747698 BM142326 AA307578 AI925552 AA578674 AA582084 AW009769 AA514776 AA588034 BG271505 AA858276 |
| | | BM142503 AW050700 AI307407 AI202532 AA524242 AI909772 AI970839 BG236516 AW750216 AA587613 AI909749 AI909751 AI910083 |
| | | AA614539 R55292 AA507418 |
| 400240 | 27222_1 | U04209 NM_005926 AU121948 BI089933 BG425282 BG686931 AW821182 AU100079 BF700972 AL565099 BG116731 BG200436 |
| | | AL555789 AL047536 BF197395 BE504960 AI304957 AA932419 AW575886 AI916292 BI033772 BG995988 AL570315 BE348695 AA331214 |
| | | AL514367 AA436797 AU134683 AL533163 BE818949 BE818946 BE818920 AU136916 AL047535 BG424079 BE294696 AU135607 |
| | | BE207326 AL514368 AA318042 BF831066 BG106341 AW865170 BE937045 AI828674 BM083453 BE385535 AW865372 BF350485 |
| | | AW382531 R01323 AA092464 |
| 432093 | 1237011_1 | AW972670 AA525808 H28359 H28383 |
| 451311 | 145689_1 | AW862765 AI769797 BF366694 BF734848 D61040 |
| 455290 | 1151240_1 | U75810 AW890252 |
| 416800 | 1995904_1 | W80508 W78708 H89652 |
| 409775 | 912104_1 | AW499605 AW501372 AW503065 AW500923 AW501639 |
| 410703 | 351960_1 | AW998552 AW998523 AW797867 BE171712 AW881832 AW798089 BF985045 AW998520 AW998553 AW797821 AW797971 AW998601 |
| 442604 | 3440_15 | BE790716 BE263710 BI019623 BI019157 AI003371 AW747962 AW747976 BF921877 |
| 424686 | 1228447_1 | AW963243 AA345251 AA345504 |
| 449570 | 79253_1 | AA001793 AA001871 |
| 455737 | 1494976_1 | BE072229 BE072246 BE072210 BE072225 BE072256 BE072221 BE072211 BE072242 |
| 418166 | 18858_1 | AK055915 BE867252 AI523348 AA765350 BF446858 Z43675 R19529 AL133837 BG389444 AW382942 BE702956 AA081961 BE835247 |
| | | BE835308 BE835295 AA376302 BE645790 AA375690 AA376592 AW954423 N85732 AA249770 AI754416 AA213816 BF592044 AA811729 |
| | | AW514842 AI633486 AI096810 AW183016 AI635738 N27524 BE645916 AI247842 AW991230 AI754277 H16814 AI766892 BF108422 |
| | | AI800361 T95129 F11313 R97946 R93989 AA375242 BF109388 AI860939 AI680060 AW953899 BF971486 AI972337 AW953841 |
| | | AA372437 AI216746 H11384 R38484 AA249043 AA249732 |
| 424339 | 50559_1 | NM_015720 AF219137 AL534420 AL524055 AL537346 AL538442 BG765888 AL530054 AL525377 BG474596 BG473144 BE251553 |
| | | BG706099 AL538039 BG703131 BE255806 BF805256 F12128 AL566773 BI828686 BF761480 AI204971 BG818818 BI199246 AL534816 |
| | | BF529941 AA324163 AL523285 BG914330 H07952 AL534815 BE769903 AI867802 BM310135 AL533702 BE254484 BF528852 BE867462 |
| | | BE740130 AL134164 AL567115 AL533701 AL524054 AL515904 AL523284 AL568203 AL534419 BF981162 BE257148 AL561833 |
| 441616 | 25638_3 | BG164527 BI757270 BM453023 BI759791 BG700379 AI300093 W80481 BE856240 AW263496 AA781414 AA922117 AI479737 AI499701 |
| | | AA742324 AW274584 AA885442 AI393574 AI926512 AA972701 AI685317 AI305153 AA434451 AI086693 AI356800 AI200095 AW627592 |
| | | AW613806 AI280399 AA837589 BE710524 AI334386 W47269 AI491703 AW338258 BG220604 AI422897 AI282124 AI218584 AI347082 AA731678 AI273274 AW022998 |
| | | AA256494 H84116 AI698561 AW182912 AI280442 AA480586 BG187364 BG216534 BG213821 BG198052 |
| | | BG191538 BG212262 AI381988 BF197074 C01000 BE621682 AV754612 AA365458 AW817587 |
| 412756 | 474357_1 | BM455759 BE698411 BE698282 BG107419 AA729879 W77904 N27422 AA210943 BE833271 |
| 445326 | 1883425_1 | AI452799 AI220072 F28010 |
| 448663 | 16112_4 | BE966763 AA659765 AI961656 AI520918 AA761743 AA281477 N66431 BE463652 AA281329 AW272944 AA058687 BM145087 AA045516 |
| | | AW341820 AA112515 AA258766 AI886639 AA714133 AA768245 AA035533 AI630459 T20165 AW971268 BE966269 AA522722 |
| 446937 | 8722_3 | AW731689 BG107453 BG178894 AV661328 AL602899 AA977190 AI189509 AW303818 AW207677 AI378518 AA581619 H99430 N30587 |
| | | BE219726 AI689955 AA463686 AI500120 AA878606 AW675161 AA463760 AW770776 |
| 423357 | 598107_1 | AI857318 AI285124 AI364333 AA324896 AW104203 |
| 407590 | 78212_1 | BE293321 AA631602 AA281564 AA927393 AI831258 AA340072 BG009209 AW956385 AW838390 N94346 BF724763 AW082728 |
| | | BE044419 AI417373 W69444 AI147614 AA632403 AI937606 AI864878 AI969211 AI081135 AA885000 AA926984 AA642586 AW079405 |
| | | AA973001 AW628858 AI521070 BG912959 BI052498 |
| 429588 | 1396089_1 | AI092511 AI080271 AA455177 AI381859 AI381721 |
| 411136 | 359870_1 | AW819430 AW819440 AW819425 AW819423 |
| 426901 | 985848_1 | AA827922 AA772123 AI827741 AI081071 AI393618 AI520759 AI393608 AA398670 |
| 445075 | 2823108_1 | AI651827 AI206885 AI699543 |
| 457370 | 1235569_1 | AW971004 AW970998 AA574217 AA493538 |
| 408839 | 234669_1 | AI355222 BF378422 AA366587 BF874552 AW277084 R26970 D79194 R27662 |
| 437810 | 6139_1 | NM_016617 AF208844 Z70222 AL515797 BI666750 BI602334 BG717532 AL554429 BI545991 AW847749 BG393649 AV757080 AI373461 |
| | | AA315780 AA301659 AI393910 AI762600 AA321522 AA331540 AF305827 BG924826 AI720715 AI079860 AA677539 AA707143 AW196875 |
| | | AI269926 AI929790 BE246362 AI753224 AI687566 AI022486 AA101081 BM150935 AI591063 AI566293 AW189841 AW515306 AW028380 |
| | | AA766135 AI084005 W02557 AI018470 AA972561 AI371710 AA954779 AA746269 AA747909 AW020207 BI491245 H89948 AI041765 |
| | | AV652999 AA889510 AW243602 AA628783 AI866249 AA736845 AL515796 BF970987 AW604215 AW604214 R53127 AA937309 |
| | | AA815183 AA976070 AA736764 AW473513 BF591731 H88829 AL566858 BI088846 R73732 BF679743 BG113547 BF243416 |
| 400272 | 863_2 | AF317549 X78926 BM457918 AW963214 BG568218 BG679871 BG912907 AV714355 AA081606 AI188398 BF792205 BF671399 |
| 410099 | 16732_1 | AK055674 AW965247 AV751598 AA290926 R53043 AA331387 AK056148 BI917678 BG819395 BG911971 BG820167 AI174254 AA348720 |
| | | AA364503 BG714279 AW893230 AA081774 H24222 AV727176 BF875715 AA081630 BE000834 AA334880 AL563737 BG029709 W52882 |
| | | AI439658 BE551237 AA283724 BF109530 AI457096 AI805992 BE467736 AA693467 AI697593 AI887863 AI167419 AW901980 AW901768 |
| | | BE702179 AA484549 T23811 BE327043 AA716027 AA917004 AA167714 BF339675 AA084618 AI418634 T31586 AA436630 AI366472 |
| | | AA706191 AI422304 AI204899 AI041169 AA211402 AW827081 AA788593 T32736 AI767935 AA747914 T03534 AW959843 AL119527 BE327037 AW901982 AW993370 |
| | | AW901977 AW902071 W60090 N79906 D52685 T07735 BE702069 BE702172 T08671 BE767121 BE767117 BE767113 |
| 451653 | MH115364_1 | BG119563 AW975776 BG498478 BE245304 AW450934 BF508792 AA599489 AA599477 AI805268 AA055489 AI128758 AA761425 |
| | | AA731858 AI302271 BE219432 AA687294 AA018972 AW629429 Z45675 AW961626 T30940 R34554 T84712 BG986694 |
| 407843 | 240894_1 | AW085847 BE155229 BE155223 BE065083 BE154014 BE153966 BF330765 BE155423 BE160795 BE155307 BF882890 BF350689 |
| 438578 | 2573130_1 | AA811244 AI373188 AI240509 |
| 400247 | 2764_1 | BC022339 BC009610 BC010537 X79805 NM_006713 U12979 BM467814 BM450743 AU132951 AU137129 BG493425 AV758819 |
| | | BG708412 BG705885 BG702217 AV716638 BG777009 BI545689 BI552153 BM476712 BG770858 BG527656 BG528277 BG391388 |
| | | AV716861 BI602926 BG290073 BI667399 BM451469 BI667173 BI602139 BG532171 BI669216 BI544727 BG721852 AV716503 AV701327 |
| | | BM090738 BI492000 AI308856 BI544904 AL599813 AV715829 AV716505 AV714587 AV717902 BF668072 AV716385 BI461927 BM090954 |
| | | AV717826 BG503676 AV647719 BG501392 BG428433 BE895629 BM313117 AW021050 BG435032 BM152910 AA313503 AA872377 |
| | | BG574714 AV712054 AV732696 AA252476 AV712759 AL599643 BE790872 BG654930 W73337 AW675377 AV760376 AV725139 |
| | | AV716379 AA887165 BE830003 AW023796 AL599291 AI902948 BG944042 F00781 AA352483 BG217897 N33888 AW581924 BG654730 |
| | | D31410 AA353088 D31288 AA295029 H95170 BE935104 AU139980 BG772963 BG776470 BG532512 BG105449 BI545421 AV715456 |
| | | AW386083 BG699714 AL535832 AL514940 BG190861 BG210593 AW999254 H95138 AA353863 BE764809 N50375 BE091363 BG701255 |
| | | BI860846 BI832485 BG168150 BG028647 BE546301 BG900321 BI909737 BG702363 BG614141 BG611137 BG700121 BF031492 N85802 |
| | | AV715940 N51590 BG993478 BE172016 AW893622 |
| 432586 | 6633_1 | BC022881 AU150944 BG750783 AW754175 AW857737 AI911659 AI050036 AA554053 AI826259 AA568548 |
| 446777 | 630089_1 | AI632332 AI341129 AW269288 AI825342 AW138243 |
| 427673 | 1371317_1 | AI989709 N98298 AI371995 AA412172 AA410427 |
| 437576 | 16775_3 | X97303 BM477862 AL555571 BI916746 BG777391 BE514383 BE312102 BM352234 BI439158 AW239231 BG535338 BE072000 BE071960 |
| | | AW577360 BE071985 BE071945 AW577383 AW749830 BE072005 BE071965 BG955674 AW577355 BI837879 BG389090 AA071273 |
| | | BE266655 |
| 414754 | 1165452_1 | AW938668 AA152116 BE000477 |
| 443073 | 590566_1 | AI280093 AI032321 AW082160 |
| 415641 | 1877037_1 | H14742 Z44481 F13256 T77036 |
| 440534 | 1049846_2 | BE561168 BE269996 AL561649 |
| 420968 | 264225_1 | AW968775 AW662892 AW592439 AW663117 BF353890 AA804580 AA834616 AA282186 |
| 443197 | 246171_1 | BF104862 AW954963 Z43613 AA320191 R83872 H15889 |
| 418330 | 36528_1 | AK056357 BG704214 BG714527 BE409405 BE514455 BE408705 BM351826 BM049253 BM352137 AI659121 AW074357 AI674368 |
| | | AW207841 BE646201 BM453984 BE674342 H19667 AI458175 AA279585 AW438632 AI687141 AA433999 AI245284 AA366782 AI948491 |
| | | AW450917 AW450396 AI949813 BE217772 BE504863 AI628938 BF059575 AI564121 AI073854 AW510570 AI769861 AW235541 |
| | | AW771224 AW236106 AW074675 AI919535 AA977064 AI364994 AI631614 W58249 AI034276 BE169956 AA743584 H19668 AI222131 |
| | | AA883261 AI351534 F10472 AW466882 AA814964 W58250 BF036304 BF932025 BM474362 BG110744 AW964083 AW369992 F12868 BF842785 AA356665 BI091945 |
| | | BG059147 W04844 R18398 BE925184 BI050068 BI825078 BE784883 AW175845 AA216130 BI257636 |
| | | AA504328 AA713664 BF754840 AW235144 R38555 R42461 BG676504 T75135 R15365 BM012684 |
| 426105 | 1227975_1 | AW962732 AA369895 AA370773 AA369894 |
| 431698 | 6468_7 | BM423504 BE075913 AI492369 AI831729 AA807134 AI057292 BF059751 AA918209 BE858647 AW016707 AI675289 AI452916 BF593014 |
| | | AI480099 AI522283 AI628681 AI470402 BF056360 AW236830 AA514206 BF055812 AI796201 BF055617 BF054827 AI288301 AA705763 |
| 431317 | 997174_1 | AW970601 AW613399 AA503435 AA502682 N91138 |
| 459057 | 40191_3 | AI808408 AW005512 |
| 415204 | 1865508_1 | Z25288 R85077 F00323 D82802 T27434 |
| 449158 | 3025931_1 | AI990849 AI652180 AI632577 |
| 459557 | 859794_1 | BG623239 N58315 AI524952 |
| 454645 | 1065291_1 | AW811928 AW811887 AW811948 AW811847 |
| 411226 | 1073516_1 | T62567 AW833022 AW833054 |
| 450724 | 40161_1 | BF060834 BI019048 AW862002 AK056737 AA429538 AW063311 AW440655 AW231970 AA428584 AA995028 AW854593 AA984131 |
| | | AA552874 AA564758 AA528743 BG927275 BE045117 AW975234 AA664937 BF749390 BG928948 AA984546 BE009153 AV732487 |
| | | BE078167 AW872716 AW063245 AA578441 AI820704 AI732283 R55428 BF999154 BF880485 |
| 414205 | 1266364_1 | BF306238 BE295439 BE382708 BE383262 BF315437 BI199567 BE382438 |
| 414883 | 8371_2 | AF274943 BG494894 AI719075 AA908783 AI935150 AI422691 AA910644 AA583187 BM272167 AI828996 AA527373 AW972459 AI831360 |
| | | AA772418 AI033892 AA100926 AU154749 AI459432 AI423513 AI094597 AA740817 AI991988 AI090262 AI312104 BI256707 AA459522 |
| | | AA416871 AI075239 AI339996 AA701623 AI139549 AI336880 AA633648 AI989380 AI362835 AA399239 AI146955 BF514270 N92892 |
| | | AI348243 AI278887 AA459292 AI494230 BF507531 AI492600 AA962596 AW613002 AA293140 AA235549 BF108854 AA954344 N49682 |
| | | AI457100 AW589407 AW300758 BE220715 BE220698 BE569091 BM009647 BF900351 AI537692 AI203723 AI857576 AA584410 |
| | | AW371667 BM172363 |
| 425265 | 921293_1 | AW505023 BE245297 AA353976 |
| 412124 | 32402_3 | BI089431 AW027705 BF377448 BF377461 BF377453 AW967810 AI341165 AI652171 AI262672 AI021922 AA564575 BG939545 AI041471 |
| | | AI350656 AA243478 AL079653 BF885008 BF092841 BF377464 BF377463 BF377444 BF092882 BF792973 BF377460 BI089398 AA627599 |
| | | N76045 |
| 452482 | 1524509_1 | BF350690 AI903640 BF350532 BF350688 BE153688 BE153461 BF350692 BE155413 BE155356 BE153488 BE155063 BF350538 |
| | | BE155210 BE155059 BE155347 BE155492 BE153577 |
| 452146 | 627690_1 | BE795675 AW206850 AW135654 BF063909 AI862440 AW401701 |
| 454204 | 646158_1 | AW816498 BF374419 BF374408 BF374405 AW808977 AW808605 BF334681 BF348941 BF348944 AW178676 BF374412 AW178486 |
| | | BF374427 BF374429 BF348942 BF374428 BF348955 BF348940 BF348943 BF374416 BF374424 BF374431 BF374430 AW808524 |
| | | BF374413 BF374418 BF334708 BF374389 BF334685 BF374473 BF374392 BF374397 BF374395 BF374407 BF374417 BF374420 |
| | | BF374414 BF374422 BF374421 BF374522 BF349306 AW808532 BF374399 BF374393 BF374398 BF374394 BF374396 AW178485 BF374391 AW808816 BF374516 |
| | | AW178483 AW808515 AW808791 BF374390 BF374415 AW808514 AW808379 BF374423 BF374426 BF348949 AW809007 |
| 409078 | 744783_1 | AW327515 AW327774 AW327571 |
| 411688 | 1097434_1 | AW953440 AW857085 T08189 |
| 437863 | 2513792_1 | AA923707 AA769989 AI393571 AA972997 AI951436 |
| 409872 | 917143_1 | AW502313 AW502681 AW502682 |
| 440612 | 1026055_1 | BE561384 AW732707 BE396946 BE513448 |
| 455540 | 430605_1 | AW993000 AV720038 AV720142 AW993293 BE080231 AW993284 |
| 438171 | 143478_1 | BF966744 AW236835 BG204580 BG220785 AW631476 BG221281 BG183393 AI816071 AW157314 BG189742 BG201352 BG188096 |
| | | BG216769 BG216076 AW261874 AW151173 AW001897 AI801254 N62855 AA779526 BG461073 BG181264 BG213529 AW976507 |
| | | AW235694 AA876913 AW117364 AW150293 AI635914 AI584106 AW148443 D12158 AI245076 R40658 D57788 BG189741 AW166670 |
| | | D12218 |
| 421828 | 207_22 | AW891965 AW604749 BE080872 R15559 BE177623 AW883520 AW945343 AI246167 T07082 AW805679 W96278 AA135796 W32615 |
| | | AW995418 AW801688 BE003837 AW801621 AW385721 AW385742 AW385714 AW604757 W87409 AW604738 AW385757 AW580796 |
| | | AW801247 BE003239 BE003183 AA847112 AW580975 AW604760 AW385727 BE164590 BE003090 AW362791 AW604759 AW866589 |
| | | AW604758 N44337 AI378548 AW890438 AA077172 AI288683 AA229639 AA091945 AW945454 AA063629 AA702504 AW861938 |
| | | AW894816 AW580841 AA094372 T06399 AW885686 BE244086 BE005035 AW861913 AA551773 AW858460 AW370926 AW754352 |
| | | AW889695 AW384408 AI907428 BE067491 AW861939 AA248197 AW381373 AW177325 AW806879 AA935217 BE067498 BE083742 |
| | | BE067470 AW894935 BE082529 AI248811 BE179917 BE002200 AW607506 AW392889 AW894560 AW381360 AI904206 AW863533 C00609 AW381372 BE082530 AW898120 |
| | | BE075323 AW392799 AW601420 AI695314 BE083790 AW858568 AW945550 BE177153 |
| | | AW970506 BE350419 AI906919 AW360794 AI906917 AW885979 AW794240 AW945566 AI688683 AI688694 AW009660 AW601421 |
| | | AW360793 BE066524 BE083901 AW369847 AW381871 AW935435 AW664582 AW877775 AW838449 BE180466 AW858501 BE180464 |
| | | AI371163 AA778231 AI174991 BE011720 AW877776 AW877800 AW877795 T19900 AW866365 AW898099 BE011715 BE167842 |
| | | BE011718 BE011724 AW363639 AW878658 AW878662 AW894887 BE082356 AW389211 AW804286 AW610312 AI904717 AW610318 |
| | | AW996909 AW610296 AW901923 AW880003 AI762171 AW062582 AW368713 AW062593 AW176663 AW842064 AW842089 AW842095 |
| | | AI243049 AW902074 AW062592 AW176664 AW751692 BE087703 AI907439 BE009686 BE172115 BE077030 AW608556 AW835577 |
| | | AI909628 BE077029 AW176241 BE077552 BE160370 BE160288 AW835656 AW606765 AW606770 AW835678 AW606758 AW606778 |
| | | AI907484 BE172821 AW606768 AW999517 AW844165 BE171738 AW751683 AW610493 BE177484 BE177487 AA090510 AW844117 |
| | | BE173367 AW999878 AI124870 BE163472 AW841823 AW379762 AW893297 AI290296 BE089132 AA610287 AW176676 AW607622 |
| | | BE172639 AW893232 AA329629 BE089008 BE178350 BE178214 BE063291 AW820236 AW999653 BE089486 BE173126 BE171775 |
| | | BE185787 AA558280 AI174840 AW999112 BE218391 BE172734 BE178021 BE172738 BE173324 AW603494 AL036722 R38192 R60905 H53721 H41052 AL037917 |
| | | R37795 AW998972 AA767189 AW044272 H50689 AA768399 AA767764 AI087888 H44202 BE222792 N90597 |
| | | W81396 N90615 AI935353 BE501168 F10945 AW118215 AI970480 AI627641 AW236081 AA574090 AI627652 AI681913 AI759983 N69591 |
| | | N69276 BE467722 AW392780 BE172467 H92861 AI524921 F02989 Z39328 F02705 F01414 T88678 AI215165 H87220 AW374781 |
| 454560 | 1061353_1 | AW807092 AW807171 AW807174 AW807425 AW807274 AW807281 AW807278 AW807367 AW807330 |
| 411942 | 1142439_1 | AW877069 AW877063 AW877071 BF361321 AW876988 AW877015 AW877133 AW877013 BF361309 AW876978 |
| 425702 | 1283939_1 | N59555 AA362113 AA362136 |
| 450754 | 665849_1 | AW204237 AI793326 AI733299 |
| 411782 | 1105929_−1 | H30518 |
| 442481 | 678752_1 | BG398943 N99828 AI110738 AF074645 BE969969 BE079873 BF185244 |
| 422285 | 428504_1 | AL525104 AL525103 AI347488 AI659881 BF509572 AI803103 AW470793 AW450703 AI885143 BF445866 BF221925 BF002607 AI090784 |
| | | AW242783 AW271587 |
| 444326 | 2795105_1 | AI939357 AI992056 AI140955 AI198235 |
| 442430 | 59995_1 | AK057699 AV654749 H77767 BE674322 AA995737 R89164 BF831094 |
| 417046 | 2446559_1 | AA192639 Z28835 |
| 400234 | 3084_1 | BC001179 NM_005336 M64098 BC014305 BI827845 BI918183 AU124191 AU125604 AU140930 AL043307 BG763670 BG824279 |
| | | AU125959 BI518466 BE271867 BM264138 BE314823 BM090633 BE273657 BG419830 BM048338 AU134368 BE163486 BE163483 |
| | | BG421980 BG768130 AW500482 AI910107 AW868323 BF083170 AW450290 BM466817 BG255224 BE394282 AU140278 BE887464 |
| | | AL042675 BI195986 BE883385 BE544751 BE270148 BM011334 AI093482 AA029803 AI610705 BE386809 F06628 AW408605 BF814085 |
| | | BC007961 BM451548 BG768053 BM452948 AU140330 BG489566 BI870474 BM014013 AU131264 BG679824 BI225752 BI457400 |
| | | BE410173 BM044254 BG763690 BE251495 BG179862 BE513489 BM005937 AI064815 BF569858 BI712614 BG655891 BG424940 |
| | | BE175180 BM313160 BG471936 BM091124 BF885884 BF870522 BE004490 BE712976 BE712862 AA401033 BF569477 BE712936 |
| | | BF353839 BE713042 AA316561 BE712974 BE712977 BE712938 BE712937 BE712867 BE713043 BE713023 N42463 BE712901 BE713041 |
| | | BE712904 BE712895 BE713012 BE713049 BE713025 BE712998 BE712988 BE712987 BE712986 BE712984 BE712982 BE712975 BE712970 BE712953 BE712929 |
| | | BE712922 BE712875 BE712866 BE712861 BE712860 BE712854 BE712853 BE712902 BE712897 |
| | | BE712912 BG984910 BE712903 BE764759 BE715723 BE715745 BE712915 AA441839 BE713040 BE715755 BF872528 BF060840 |
| | | BG395104 BG744878 AU124081 AI889823 AI801072 AI633102 AI678670 AI493608 AW194294 AI354559 AI686736 AW152477 AI419496 |
| | | AI720319 AI866190 AA047013 AA039625 BE049622 AA369065 AA025686 AI570198 AA706304 AW439251 H64553 AW168006 AI983753 |
| | | AW081999 AW082909 AI951490 BF886341 AW591246 AI190143 AI151074 AI499541 AI050934 AA402167 AA382049 T16207 T03299 |
| | | AI932691 AW571663 BG479797 BE408436 BI460153 BG386046 BE616601 AW151629 BG236164 BF852743 BF852046 T57801 W37981 |
| | | AA482668 H43740 W58142 W25087 BM459852 AU125403 BG767992 BE258516 AI114509 BE394494 BE386905 AA450315 BG750593 |
| | | AA557855 BG766487 BG766998 BF948864 BE279327 BE870900 AA577098 BF365851 AA745058 N29867 AI625038 AA641801 AA846174 |
| | | H26395 AA025568 BF690282 R67845 R72666 H39554 T78959 W01317 H45860 W80837 N53985 BG757202 BE838055 BE072895 |
| | | BE072668 BE867012 BM042833 AA083591 BG745462 AW374086 BG831326 BE715757 BG767243 BG763272 AA113402 AI024044 |
| | | BF818501 BE081938 BF353818 AA746336 BM019086 BE712894 H16977 H45012 R10793 BE708619 BF570432 AA593938 AA064637 |
| | | T28082 AA852845 T78907 AA346590 F00017 BE966368 N58726 AA732431 T54379 W80749 BF238314 BE279768 AA325106 T19241 |
| | | BE409939 BF852119 W23803 T54011 AW392638 BI465185 AW516784 AA211335 BI159846 AA064680 N80615 W49676 BF851406 |
| | | R88120 AA434028 H44546 T61029 N44804 AA114948 H26960 BI261965 AA582599 BG469385 BF818172 BF923672 BI024270 AW362633 |
| | | BE883122 BM470779 BE935760 AW856056 AW856103 BE828607 AW381799 AL121058 BE828618 BE769545 AA102142 BG749978 |
| | | BI770417 BI862544 AI110687 AF063562 BE740347 BE874864 AI305113 BE513675 BE091369 BI046660 BE091453 BI046548 AI673786 BF868704 AI025179 BF356840 |
| | | BF886357 BF886313 BG951884 AI347880 AW627563 BF932536 AW820377 BF739372 BF831620 |
| | | BE068264 BE613627 AA641745 W01130 H28252 |
| 434206 | 185910_1 | BF591031 AW205438 AA933791 AI434866 BF513564 AI191480 AI972330 AI582824 AW779392 AI359970 AI199117 AI910783 BF800971 |
| | | AA627401 AI799778 BF222639 AI937737 AW136973 |
| 409960 | 39576_1 | BE644758 AI082238 BF940027 AI201079 AI436035 AW275966 AI085394 AI291655 AW070441 AI474134 AI268978 AI769279 AI567682 |
| | | AA693941 BF477668 AW664149 AA283782 BF509538 AW296868 AI268977 AI168133 BM352065 AI262769 BF941976 AI056920 |
| | | AA481861 BF763697 AL565888 BM352383 AA427768 AA385346 AI186988 AA931831 AA134972 BF217480 BF111012 AA908246 |
| | | AA319849 AA318136 AL514271 BF364291 AL515057 AV702312 AA377395 AL544217 AI341000 AW193583 AI350789 AA888338 |
| | | BF945380 AW879092 AA130839 T91066 N92326 AI004389 AA078832 AL572370 W04622 BE314003 AW960808 BM360872 AA319160 |
| | | AA130778 AL514257 |
| 451617 | 86010_1 | AI346282 AI095742 AW264306 AW264209 AI582421 AI536545 AW503193 AW134845 AA563713 AW074239 AA018842 AI807383 |
| | | BG060054 AA716066 BI042559 W37890 AI375422 N23383 C01056 AA772036 BF953159 |
| 409189 | 108922_1 | AA075168 AA070377 BG876547 N84829 AA065075 AA070346 AA085208 AA082764 AA083380 AA076512 AA113255 AA100017 |
| | | AA125984 AA079891 |
| 455618 | 354455_1 | BE155574 BE155563 BE155556 BF988228 BE061294 |
| 437063 | 10748_1 | AK000711 AV706281 AI990891 BM021502 AI198420 AW135128 AW296896 AI972531 BF433758 AA972785 AA912863 AI699929 |
| | | BM353878 AA446409 AL047908 AW664908 AI768280 AI418839 AI379964 AI399807 AA435632 AI383321 AA256372 AA459268 AW512463 |
| | | AW015449 AI961893 AA748516 AA448386 AI560461 AA465229 N41016 T24027 AA447151 N46418 AI393430 AA565928 AW468864 |
| | | AA632571 AA904477 AA436438 AA446105 AA012996 D62192 AI382506 R40297 AV704817 AA459497 AA393443 AA663571 AA448383 |
| | | AA256888 BM021226 AI909083 AA429833 AA299114 AA034292 AW291004 H85814 AA012995 H56165 AL047907 AI339983 AW074407 |
| | | N93781 AA351108 D79494 BF510070 AI419381 N56890 N67978 AV706037 BF572871 BE972375 H56381 |
| 400203 | 11774_1 | NM_002794 D26599 BM469989 BF305151 BG821966 BI089030 AW007738 BI222910 BM049422 BG028749 AI189162 AI831230 |
| | | AW131497 BM272215 BE791105 AW778828 AA479594 AA480133 AA131997 AA284572 AA453009 BF928258 AA152127 AA393918 |
| | | BF765307 BE247542 BF934697 BF341798 BE253409 AA470620 AI828932 AW379902 AV762678 AV741784 AV760892 AI025755 |
| | | AA878562 AA630630 AA761708 AA862518 AA865831 AA862947 N53065 AA131821 AA293499 N23342 N26856 AI147346 AW951549 |
| | | AA772963 BE245986 BG208493 AI831666 BG474873 BI023168 AU149647 BG197069 BG191102 BF304178 BE536135 AA706900 |
| | | AA443583 AI002710 AW276192 AU149842 BG214797 BG198193 AW197923 AW627799 T98663 BG194788 BG214656 BF345258 |
| | | BG716363 AI066528 BI546220 AA393815 AA132004 AA353826 H97858 BG187823 BF841463 AI351714 AV735966 BG196439 BG216840 |
| | | BG198438 BG400762 |
| 434878 | 119973_1 | AW975086 AA652771 AA658179 AI494481 |
| 447197 | 2176805_1 | R36075 R36167 AI366546 |
| 459376 | 31010_1 | BC002465 BE254864 BG472164 BE258770 |
| 455475 | 1175177_1 | AW948153 AW948139 AW948124 AW948125 AW948131 AW948145 AW948164 AW948134 AW948127 AW948162 AW948157 AW948151 |
| | | AW948196 AW948126 AW948158 |
| 440129 | 2607882_1 | AI732997 AA977633 AA865818 |
| 410859 | 1061852_1 | AW807671 AW807841 AW807914 AW807676 AW807920 AW807604 AW807905 AW807765 |
| 443108 | 2431141_1 | AI829905 AI033329 W86975 |
| 411436 | 1083231_1 | AW846159 AW846377 AW846433 AW846528 |
| 448501 | 8235_1 | BF963346 BI460763 BI599382 AI188089 AY055003 AW959185 AA187681 AI692282 AU153608 BI493898 BI493899 AI797349 BE550679 |
| | | AI701137 AA744561 AA082682 BE218816 AW511501 BF447881 AI859101 BF059295 AI914038 AI346564 AI685003 AI676076 AI125336 |
| | | AW469637 T10225 AI831296 R53451 AI453440 AA983739 AW470873 AI348290 BE857670 D55901 Z43908 T34429 F07305 AK074340 |
| | | AL538118 BG201484 AI334192 T35535 AW176751 BI496132 BI496133 AA469961 H72176 BF326265 AI770016 AI693177 BF223634 |
| | | BF963661 BF962265 BI034894 AI475851 N69071 AI910707 BE219038 AI918036 BE670589 BM193515 AI338497 AA805525 AA487625 |
| | | AA830336 AA749368 AW104323 AI628055 AI932332 AI272788 AI536849 AW162414 AW161923 T23854 AA610763 AA912188 AW339028 Z39946 T10224 F03171 AI205478 |
| | | AI638791 F02580 F01551 AW207551 AA421030 BE246012 BI034937 BI035373 BF939581 H19984 |
| | | BE867247 H92677 N55988 BF957332 H18615 R16442 BF956229 BF961886 R12698 AA101186 AA365932 R53452 BF062714 BF959364 |
| | | H41634 AW086187 H19985 BF054881 F02581 H18616 H41527 AW003446 BE243443 H92276 AW954002 BI670132 |
| 422890 | 61426_1 | AK057805 AW162343 AI190479 AI093318 BE048820 AI198397 AA654667 BE219303 Z39851 F02655 Z28734 T16575 F10145 Z45266 |
| | | AW572911 AW964436 AW004030 AI632565 BE502530 BI792383 BF056928 AA449241 AI651825 AA805324 AI264863 AW196918 |
| | | AA948267 AI953735 AI263703 BF056387 AW594171 AI867447 AA319159 AI903440 AW956110 AI366013 AI867923 BG911906 D81142 |
| | | C15616 AL538697 Z25032 Z43784 R13382 AV746924 AA449369 AA318815 BF364265 H17038 H10064 F04161 T87230 R40898 |
| | | AW204071 BI819428 AA683393 AA683376 Z43192 T74078 T05103 F12527 T77951 H10118 H17037 BF855407 R19603 |
| 438814 | 641599_1 | AA883216 AW170014 AA826278 |
| 437838 | 2512601_1 | AI308202 AI307229 AA769348 |
| 411911 | 1141625_1 | AW875951 AW875950 AW875939 AW875957 AW875948 AW875936 |
| 455299 | 364754_1 | AW891790 AW891797 BG003264 BG001459 BG002583 AW891612 |
| 410600 | 497855_1 | BF347859 AW499616 AA191322 AW499617 AL601010 AW575742 AA729043 BE463447 AA086179 BE549623 AI335824 AW408712 |
| | | BM149172 |
| 444298 | 67578_4 | AL039867 AI139927 Z17870 |
| 440035 | 359_4 | BC018584 NM_021831 AK025492 BI711294 AW574711 AI819256 BC018562 BM009183 AW973895 AI379616 AI333037 BI259314 |
| | | AI039603 AI085721 AI334184 AI351665 AI355677 AI399638 AI378200 AA150445 AI955108 AA827596 BF508487 T91077 AI919430 |
| | | BF434608 AA193689 AL532354 AW080055 AA860369 AI143451 BG744632 BF822458 AA707356 AA035097 N20028 AI620258 W79520 |
| | | AI471067 AL577305 BG750060 BE513499 BE268712 BE560765 BE540972 BI829285 BG720872 AA190575 BM014928 AA035096 |
| | | BE870633 BI226012 BI222402 BG718729 BM044958 BG718967 BI085526 BI561896 W27694 AA156945 AI041365 AI520777 AI919222 |
| | | AA781071 AA152279 AA594545 AA861397 AL522279 AA632356 W79407 BG164415 |
| 400120 | 133_1 | BC014030 NM_004068 BC004996 AK057883 D63475 BM468205 BG386792 BG750447 BG575842 BG479084 BG741027 AU118129 |
| | | BE901043 AU141281 BG825395 BG338276 BE396231 AU121493 AU131489 BF341132 BG335659 BI769251 AU142779 AU124483 |
| | | BG480828 AU121353 BG702326 AU137866 BG759046 BI460601 BE887290 BG750415 BF127710 BG757819 BI160266 AU122086 |
| | | BG824046 BG744180 BE884943 BM006610 BG702599 BI870749 BF307033 BI334771 BG480606 AU142599 AU141336 BM018563 |
| | | BI335565 AU138308 BE391241 BG774488 BE278025 BG717959 BG706920 BE312567 AU138300 BE303034 BE303016 AU139252 |
| | | BE336797 BG470940 BE336735 BF305197 AU134288 AU139907 BE261245 BE208718 BG761912 BF212890 AW732692 BM011258 |
| | | AW247629 AU136696 BF530078 BF204146 AL048752 BG328927 BE388385 BE260122 AU138789 BE253465 BF733914 AW249415 |
| | | AW239535 BE311791 BE256236 BF529742 BG770465 AW245777 AW245813 BE296677 BE266852 BE168115 BE396596 BE280057 |
| | | BE168229 AI750820 AU134137 BF792191 AI272215 AI907348 AW238875 BF805152 BF568397 BE712727 BE081443 BE001805 |
| | | BF724536 BF744705 AW247385 BE796369 AU133759 AV705142 BE794402 BM465821 BG281284 AW384831 BM450689 AU134125 |
| | | BE311650 BF356318 BM462831 BG420555 BE749127 AU134590 BM019438 BC013796 BG761223 BG122058 BE872076 BG748496 BG821374 BE619159 BG423244 AU137110 |
| | | AU127210 BE270081 AA496860 AA351380 AA356303 AU099781 AA355912 AA371411 |
| | | AA325535 U36188 AL569574 AL577204 AL525543 AL567342 AL567334 AL567122 AL536527 AL567098 BG681585 BG824951 BI870652 |
| | | BI225855 AW393878 BG750632 BI223803 BE877552 BE270473 BE389392 BE779021 BM017845 BI117816 BE396513 BM049006 |
| | | AW393945 BE786941 BE267724 BE562981 BE314236 BF744102 BM019781 BF806063 BF828673 BF829181 BI008788 BF829180 |
| | | BF829175 BF433802 BE909928 BF839784 AW578564 BF943095 AW328030 AA448596 AW882688 AA909846 BF924341 AW361460 |
| | | AA425174 BE940557 BF761585 BF931276 BF934886 W68597 BF933977 BI035906 BE836064 BF837576 BI018368 AA205908 H54612 |
| | | R88902 BE812330 BE932300 BF924562 AW805376 BE769859 R87381 AA371901 BE838855 AA326381 W56191 AA341231 AA464093 |
| | | AL575977 AL518650 AL547393 BG338327 AL517563 AL536921 BG207096 BG207589 BG199290 BG220159 BG744842 BG104730 |
| | | AA555035 AA618009 AA861062 AA610582 AW245418 AI040983 AA521380 AW245455 AU147292 AU155236 BE620286 AW250767 |
| | | BF888236 BE620819 AU154343 AU150827 AU148334 AW069495 AA701091 AU155225 AW250019 AA666235 AU147764 AA449739 |
| | | BF907598 AW043731 AU144390 AI924565 BE300631 AW874021 BE208088 BF732773 BF594057 AI159873 AU143930 N24100 AI052499 |
| | | AI989370 AI366151 AI139248 AU144776 AA838250 AI095433 AI269227 BF811358 AU151352 AA477554 AI131290 AI049797 AU157349 |
| | | AA620559 AA581533 AI338299 AA402755 AI050079 AU157614 AI280691 AA706590 BE206615 AA861056 AU153214 AU155712 |
| | | AW069554 AI081124 AU155846 AI081123 AA719876 AI754976 AI027763 AA723095 BI518782 AW050706 F37521 R79062 AA565530 H39826 AA404670 AU158884 |
| | | AI139682 AA513633 AI283202 AA651856 AI623515 AA427413 AW248474 BF841432 BM453246 AI302390 |
| | | AA808269 AI249357 AA132775 AA716732 AA479932 AI198296 AI208674 AI088433 F36977 AA496899 AW615762 AA602541 AA341161 |
| | | D58785 T15399 AI286077 W69152 F28418 AI272156 AA338034 AA568455 BE206121 AI080033 AI699680 AA861255 AI953465 AI613240 |
| | | AL581773 AL531577 BF526361 AA657809 AW152670 BE621523 AW078705 AW673719 AA102613 AA195604 R72209 AA402208 |
| | | AA404305 N24999 AI963535 D54741 BI461415 BM475959 BI260926 BI116213 BE280120 BE940258 BE280044 AI905744 BG001474 |
| | | BE937718 BF799283 BI091621 BG421006 BG289235 BF736825 BI253429 BG170064 R72512 T92815 BF931257 BM455183 BG033362 |
| | | BG574220 N31395 BF739185 AA371995 BE879011 BI198754 BF378989 T12266 BM019421 BI194570 BF378992 AW996595 BI858649 |
| | | W94605 W61345 AA122384 AA171923 T92736 AA761504 AI819039 AI439358 AL517777 AL565919 AA622001 AA642695 AA704144 |
| | | AA081465 AA070621 AA375562 AA700011 AA926863 W37310 AL566236 BF677809 BG760021 AW361433 BE828605 BE268449 |
| | | BF805977 BG292452 BF981071 BF217108 BF928698 R33993 AW882841 AI857453 AW078733 AI433035 AI018103 R90927 AA804720 |
| | | AA551734 R33835 H19741 R78754 BF930494 BG109583 AA631926 BE834008 BG996533 |
| 429462 | 5761_2 | BC008352 BM006782 AW245715 AI890356 BF445407 BE222242 AW139455 BE549685 AA987521 AA960934 AW245359 AA453285 |
| | | AA976507 BG055359 BM007094 |
| 446830 | 41421_1 | BC020595 BI488430 BG168023 BE179030 AW294203 BF849776 AA459064 AI917452 AW403072 W27419 BF914568 BF798468 |
| | | AW370558 T35055 AW370623 AA399232 AA214221 AW802987 BF902228 AW370622 BF819597 AW370567 BF914313 AW954040 |
| | | BF060706 AA194237 T25074 C01285 BI489433 |
| 400125 | 9675_1 | D78361 D87914 BC013037 BC010063 BC007247 BM463837 BG478630 BM463154 BI666615 BM459684 BM453662 BM453786 BM047472 |
| | | BE900180 BF343030 BI600045 BG755862 BM019670 BI596806 BI334555 BI596686 BG703983 BG338513 BM016325 BG701724 BI602310 |
| | | BF974248 BG825153 BI601788 BG826747 BG823109 BM043228 BE792227 BE276371 BE619490 BG699290 BE875106 BG764897 |
| | | BE297371 BI083984 BI261435 AV708008 BM020241 BG769564 BE276363 BE782631 BE621029 BE269266 BM009681 BG752384 |
| | | BG708932 BE264756 BG822294 AV655728 BM010141 BG764961 BG708520 BE882611 BI225883 BG705799 AV685946 BG257658 |
| | | BI598660 BE304415 AV702447 BG748238 BE269385 BE383094 BE266448 BI868791 BG826478 BG423317 BG033769 BE265113 |
| | | BE270094 BG423167 BI334713 BF311958 BE385530 BE262622 BG576563 BE882639 BG939261 BE296716 AV702822 BE292912 |
| | | BE385748 AW404766 AA313782 BE884711 BE781140 BE397059 AL121483 AW405810 BE264213 BI438381 BE264869 BG686776 |
| | | BI667400 AW950282 AA307682 AW248234 BE513268 BE279880 BE269204 BE396504 BG419840 BF725176 BE900202 AA308557 |
| | | BF725611 BI549558 AW575370 BM272866 |
| | | BE551344 BF725743 AW406696 AI401132 AW575527 BM312069 AW406436 BF725705 |
| | | BM272877 BE302894 AA309714 AI871787 BF347516 BE408306 BE314993 BE267390 BI908563 BI837140 BI821837 BI521207 BI837505 |
| | | BI822161 AA317001 BE207225 BI754627 AI689750 BI909534 BI764695 BE263483 BI906501 BF149297 AW246261 AW406823 AW406016 |
| | | AI792406 AW405766 AW247989 BG655937 AW406365 AI929708 AW406994 AW404540 AW732985 AA351302 AI299658 AA311847 |
| | | AW406963 AA312048 AW404396 AA374650 BF025776 AA302326 AW404904 AA233498 AA371786 AA360608 AA352537 AI904689 |
| | | AA296974 AW405056 AA381543 AA381946 AW369724 AA345437 BE163548 BE163476 AW996790 AW901359 BE709949 BE709922 |
| | | BE797158 AL517239 AL542136 AV752296 AA302909 AI469136 AA569581 AA321755 AI753370 AW769988 BG152412 N79811 AI524667 |
| | | AI028654 N75351 AI971354 AA873772 BM142020 N93051 BM141746 AI819519 BF448393 AW131088 AI680121 BF940970 BI468461 |
| | | N64809 H81687 AI932580 W72498 AI418617 H97476 AI634888 W81227 N92886 N69882 R51087 R28305 AI623535 F01410 BF216926 |
| | | BI060242 AI991320 AA573813 AA357272 AA778588 F22071 AI500046 T34044 F19132 AI914838 AI688763 AW969985 BF882549 |
| | | AI191071 AW473453 AI500047 AI860191 AI439085 BG939534 AI469726 R89388 D20006 AA729773 AL542476 BE162911 AA010461 |
| | | BI160800 AV704564 AI660824 AI345965 AI588895 F17300 AA579720 AA570197 AA865991 AW149676 BE272153 AW055113 T29965 BI060387 BF916086 AW090265 |
| | | AA351301 AI922370 N24035 AW149561 AW117762 T59861 BG481492 AA659904 W93933 H89803 |
| | | AA858115 W47305 BE925168 BE395221 BE537366 AI151066 |
| 446457 | 2871742_1 | AI949435 AI921903 AI300580 |
| 454923 | 1082210_1 | AW845406 AW897236 |
| 418647 | 243680_1 | AA226513 AA383773 AA226198 |
| 455642 | 1489271_1 | BE063966 BE064034 BE064028 BE063869 BE064033 BE063968 BE063965 BE063874 BE064043 BE063884 |
| 457146 | 881_1 | BG426090 AW071802 BF058083 AV723821 BG433915 AI672895 AI818871 AI017491 AA421820 AA284792 AI418120 AA558952 AA910750 |
| | | AI268326 BG613224 BG325068 AV724733 R54850 AA973795 AA171449 BF883665 BF883667 N46097 |
| 436314 | 142774_1 | AA708982 AI095911 AI983409 |
| 407347 | 810943_1 | T23514 AI655785 |
| 454515 | 1058442_1 | BE062940 BE079700 AW803201 |
| 458744 | 827170_1 | AW445183 AI380746 |
| 419557 | 149562_1 | N94706 BG536024 BF824886 W01777 AI949662 N50068 AA917338 BE550711 BF739895 AI340079 AA971513 AI467976 AI694919 |
| | | AW206626 BE328279 AI310369 AI307346 AI862813 AA425773 AW475016 AI932791 AI567886 BM128600 BM128547 AA621126 |
| | | AA244453 AA369087 BM128368 BM128327 AA628674 BF223957 AI678489 H10786 AI857652 AA502988 N63025 AA244420 |
| 415989 | 10194_1 | BC013389 BC017398 AI023543 AA191424 AI267700 AI469633 AW958465 AW953397 AA172056 BE940298 BF909208 BF909980 |
| | | BF095153 BG285837 AI720344 BF541715 AA355086 AA172236 |
| 447460 | 22756_3 | BC015313 BG104940 AI380282 AW872495 AI436655 BF439817 BF109066 |
| 448889 | 1514989_1 | AI587189 AI816573 BE140902 |
| 439117 | 4929_1 | AF085975 H53459 H53458 |
| 430539 | 31268_1 | AK001489 AU129447 BF959274 BG565452 AI245327 AU116848 BF358559 BF358554 BF358570 BG678119 AL515852 AU154607 |
| | | AI357567 AW874359 AI122554 AA406478 AI091013 AI866679 AI686163 AA662158 AA911580 D31095 AI302576 BF588761 AU151560 |
| | | AU143828 AI291610 AW169600 D31161 AA905362 C21179 BE327258 D31474 AW439053 D31309 BF756901 BI838626 BF979839 |
| | | AU149562 BM142116 AU156455 AA452028 AW473972 AW468490 AA410271 AI475944 BF821859 AA658188 AI360390 AA226320 F37355 |
| | | F27660 F36093 AA152126 BF930021 BF375775 AW821784 AW975085 W16475 D31031 BG696392 AW860676 AW752864 BI013705 |
| | | BF965715 BF326604 AW821786 |
| 443784 | 82683_1 | BF970444 AL040806 BF829540 AW612344 BF829549 W78883 AV752303 AA355882 AA286965 H83215 BE895370 AI191264 N98817 |
| | | R16590 BE793490 BE621572 H25334 H26704 AA074589 AA194985 AI084640 AI040923 AI367435 AI187367 AI127094 AA132771 |
| | | AI273475 AA553397 AA620288 AA287968 H82982 AW298586 AA765121 AA405226 AA406125 AA722863 AA860925 BF515351 F11046 |
| | | AA992696 R89635 AA075266 AW058095 W84657 H26626 AA575897 AA836488 W88453 X96619 W90020 H25291 R16533 T54676 |
| | | H26705 H89489 H89635 BE828780 BF888069 AA216309 BF091562 H26680 BE259933 |
| 429438 | 30460_1 | NA |
| 412700 | 18692_7 | BG164322 BF510268 AI681542 BE222433 AI299965 BE220552 AA115728 BE896438 |
| 408756 | MH1740_17 | AA524743 BF515403 BM353526 AI803357 BF000688 AW665479 AI672715 AW150325 AW589318 AI693038 AI370572 AI167636 |
| | | AA057236 AW439079 AI097376 AI382060 AI684871 AI684860 AA913419 AA806162 AI673426 BI324967 BM149631 BM145789 BM353796 |
| | | AA913878 BM148707 N38884 BI761934 BM145978 BE243268 BE246569 N38883 |
| 417952 | 75065_1 | AK024870 AW361863 AA132516 AA047268 AA931767 AA349517 AW090602 H18429 AW979065 AW360829 H07105 AI192838 AI866559 |
| | | AA405498 BM148597 BG391026 AA210693 BG503033 AI764977 AI167261 AA210812 AA834832 AA829145 AI824218 AA595531 |
| | | BG539322 AW962918 BG957109 BG956751 AA369687 BF805524 AW798909 AA303140 AI216690 BG957010 H06593 AA303141 |
| | | BM153757 BF238864 |
| 454631 | 1064852_2 | AW811332 AW811335 AW811328 AW811329 AW811339 |
| 454171 | 1049240_1 | AW854832 AW854798 AW854857 AW854816 AW854834 AW854817 |
| 406740 | 0_0 | AA577274 AA908437 |
| 407644 | 27910_1 | D16815 AL563603 BG399756 AI935028 N41813 L31785 AL529953 AA428473 AA401262 BF802576 AA373868 BE886120 BM479352 |
| | | T28309 N57167 BI551531 BG037160 |
| 431788 | 71947_1 | AK054586 AL526339 BG257506 AW303347 AA594114 AA770237 AW117421 AA992677 AI028634 AA947172 AI242148 AA641234 |
| | | AL574323 AI219861 AI806256 AI033441 AA532785 AA905552 BE908245 N56134 H28597 R00255 AA969941 AA515532 AA887328 |
| | | AW104956 AI825261 AW207328 BE552249 AL562032 BI459483 BF447646 AW341155 |
| 419200 | 9531_1 | BF036043 AW190446 BG194731 AW662036 AI445021 BE937550 AW818972 AW393132 AA834685 BF112058 AV721682 H16423 |
| | | AI270167 AI857345 AA937302 AW818444 BE929780 BG498678 BF155010 BI598271 BI599811 BE161728 AW578737 AW753711 |
| | | AW379707 AW381918 BG506608 AW028637 AW994240 BF887392 BF790073 AW381624 AV727105 BF439618 AA443174 AI018009 |
| | | N42850 AW573242 AI417258 AA463483 AI676131 AI167170 AA836627 AA443828 AW592922 AA235129 AA730278 AW439062 AW474332 |
| | | BI043239 AW474342 BG708553 AW362423 BF090028 BE827256 R16550 R39478 R39479 R94368 BG540916 BM314745 AA251087 |
| | | D54231 D55274 BF085805 D31589 AW966405 AW994425 D81879 BE093545 AW901107 AA383529 BI021552 R56420 N39976 AA573281 H82595 AA234955 BE093539 |
| | | AW367006 BF358697 BF366318 AA663856 BE702099 BF035969 AI267384 AI267232 BE348320 AA621574 |
| | | AA861212 BF083343 BF083341 AV745131 D53074 AW954476 AW954472 AA376836 AV724531 D53063 C14928 AA093287 AA062638 |
| | | BG483558 BE940050 AA765954 T70171 BE938775 BE940057 D53502 AW373300 AL118798 BM128728 AA193411 AW444709 AW952455 |
| | | AI887612 BF431948 BI496876 AI264159 BM128481 AI624657 AI689301 AI969467 AA861685 AA251595 AA625761 AA872090 AI826790 |
| | | AA328366 BE827416 R75951 D56918 R68122 BE827384 AL118797 AI184164 AA164411 BI495332 BE858113 AI863860 H00660 T69849 |
| | | AW780389 C14667 BE934995 BI018652 R92801 AA164410 H00752 AW373305 AW373299 AW373302 |
| 420711 | 36528_1 | AK056357 BG704214 BG714527 BE409405 BE514455 BE408705 BM351826 BM049253 BM352137 AI659121 AW074357 AI674368 |
| | | AW207841 BE646201 BM453984 BE674342 H19667 AI458175 AA279585 AW438632 AI687141 AA433999 AI245284 AA366782 AI948491 |
| | | AW450917 AW450396 AI949813 BE217772 BE504863 AI628938 BF059575 AI564121 AI073854 AW510570 AI769861 AW235541 |
| | | AW771224 AW236106 AW074675 AI919535 AA977064 AI364994 AI631614 W58249 AI034276 BE169956 AA743584 H19668 AI222131 |
| | | AA883261 AI351534 F10472 AW466882 AA814964 W58250 BF036304 BF932025 BM474362 BG110744 AW964083 AW369992 F12868 BF842785 AA356665 BI091945 |
| | | BG059147 W04844 R18398 BE925184 BI050068 BI825078 BE784883 AW175845 AA216130 BI257636 |
| | | AA504328 AA713664 BF754840 AW235144 R38555 R42461 BG676504 T75135 R15365 BM012684 |
| 408283 | 645845_1 | BE141579 AW178109 BE141573 AW807502 AW807510 AW807228 AW807125 AW807374 AW807480 AW807486 AW845845 AW807500 |
| | | AW807477 AW807555 AW807208 AW807478 AW846124 AW807470 AW845864 BE141596 AW807465 |
| 455908 | 1526468_1 | BE156188 BE156298 BE156306 BE156374 BE156377 |
| 408338 | 647704_1 | AW867079 AW182772 AW867086 |
| 440028 | 598730_1 | AW473675 AI190744 W69997 AW104913 AI221098 W69996 AA885487 AA861491 |
| 427239 | 20459_2 | AL532360 BE794750 AA582906 AI015067 AW271034 BG271636 AW075177 AW071374 AI345565 AI307208 BE138953 BE049086 |
| | | AI334881 AW075006 AW075181 AA464019 AW302733 AW075100 AW073433 AI802854 AI334909 AI802853 AI345036 AI348921 AI340734 |
| | | AI307478 AI251289 AW302327 AW072520 AI312145 AW073656 AW072513 AW071289 AI307559 AA876186 T29587 AI307493 AI255068 |
| | | AI252868 AI252839 AW074809 AI252926 AI252160 AI251662 AI251262 AI610913 AI270787 AI270156 AI252075 AW073469 AW072901 |
| | | AW072496 AW071420 AI305762 AI254764 AI802837 AI251264 AW073049 AW071311 AI340643 BE138965 BE138502 AW073456 |
| | | AI334733 AI054335 BE139260 AI054302 AI054060 AI054057 AI053722 AI289711 BE139228 AW470478 AW271039 AW302085 BE041872 AI254494 AI271496 AI252427 |
| | | BF718773 BF718645 AW074866 BE857822 |
| 420762 | 9515_9 | BG121009 AA280094 Z44768 BE931923 AA249363 |
| 457133 | 775_1 | M54968 AA861543 AA356548 AI469981 NM_004985 BC013572 AW242010 AI740449 BF588730 AA425263 W21091 AI554920 T28976 |
| | | AW966530 BC010502 BM146110 AW504574 BG142117 AA232870 AI539465 AU123937 BI260541 BG261289 N24354 N32462 H08297 |
| | | F05452 AA281203 N80109 AA330460 D51551 BE178107 BE177839 BE178094 BE178141 BE931948 BE178093 BE178215 AL138354 |
| | | AI091259 AW020801 AA287991 BE178352 AA281183 BE178186 R70669 BI833742 BE178449 BE178043 W47526 BE178018 BE834453 |
| | | W93668 BE177936 AL576273 AU151852 AI004579 AW453052 AA287927 BM144801 AU155143 AA281094 AA737010 AA872481 |
| | | AA676681 AA843916 AI697660 AA564243 BF109372 AI015987 BF432094 AA937541 AI334416 AI281159 AA582189 AA553559 AW160515 |
| | | AA255527 AA670007 AA808271 AA281015 AA649252 BE464958 AW167917 BF436494 AA525301 AI889481 AI364302 AW173466 |
| | | AI676214 AA243624 AA648116 AA854442 AA721296 F01713 BE178360 BE178299 BE178460 BE178385 BE178424 AI301629 BE049265 |
| | | AU151277 AU155121 AU155337 AA889246 AU153181 AA342730 AW601642 H08199 R41588 R99351 H84241 W47527 R26447 R49696 |
| | | H02312 R79833 AV716970 AA262387 BE178441 BE178356 BE178100 BI491761 BE178467 BE931952 BF758698 BE177893 BE178336 |
| | | AA256711 W80934 BE178447 AV689618 BE178438 BE177844 AV659669 BG619554 AU134516 R35396 BE178029 R28455 AW368425 |
| | | BE178017 BE177999 R34165 R79640 BE178422 BF761849 BE178196 BE178443 |
| 418874 | 2326268_1 | T60872 T60906 |
| 441252 | 122_1 | NM_032315 BC004991 BM468629 AL583162 BE741793 BE303031 BE244077 BE302759 AL583161 AL572691 AI804708 AI129827 |
| | | AW872388 AI653103 AI151487 BE504355 AI671476 AW770976 AI206149 AI678224 BE468167 AI201164 AI200893 AA574128 AI991968 |
| | | AW194793 AA426113 AI220474 AI201028 AA757281 AA844723 AA398466 AA484977 BF059403 AI470557 AA435830 AW016602 |
| | | AI915990 BF356355 AL569855 AW978643 AW242882 AI823516 AW235374 BF059684 C20622 T66303 AI912746 AW339765 AA968541 |
| | | AL526958 BF433829 AA628313 AW578403 AI909734 N75265 AW274422 W02124 BG474952 |
| 424055 | 889171_1 | AA337234 AA334524 AA337774 AA337229 |
| 458335 | 2696571_1 | AI762479 AI479609 AI001070 |
| 445243 | 1786048_1 | AI762401 AI217439 C20714 |
| 410847 | 1061340_1 | AW807424 AW807090 AW807326 AW807172 AW807368 AW807079 AW807332 |
| 411051 | 7023_14 | BE145287 AW853931 AW814931 |
| 455211 | 1110641_1 | AW866450 AW866449 AW866306 |
| 400249 | 993_1 | BG260581 AI743827 AA182444 AA927609 NM_001326 U15782 BC010533 AA779834 AI086366 AI452475 AW274511 BG056719 |
| | | AW026350 AA808891 AW080007 AI763436 AU154714 AU155464 BF196839 AI934353 AI376072 BG232033 AI040445 AA700556 |
| | | AW004704 BE047781 AA470756 AI091381 AI302228 AI400050 AI142702 AA614554 AI467907 AA282801 AI434140 AI357496 AA748501 |
| | | AA430113 BF060907 AW207004 AI367341 AA873520 AA764823 AI077410 AA253061 AI052369 F08358 BM456285 BI518533 BI836074 |
| | | AU133365 AU131081 AU127466 AA173834 AW999116 BG571523 AU100072 BG290403 AI743461 W90141 D58551 AA181551 AA094014 |
| | | BG724183 |
| 439092 | 919640_1 | AW978407 AA830149 M85983 AW503637 BF352096 |
| 454838 | 1074031_1 | AW834044 AW833984 AW833985 AW834004 AW834065 AW833986 AW834076 AW834038 |
| 435542 | 132718_1 | AW975503 BE763276 H74234 AA687376 |
| 435784 | 135784_1 | AA778903 AA700146 AA705437 |
| 456381 | 250281_1 | AA236606 AA237079 AA459341 |
| 412636 | 1438_1 | M77830 NM_004415 AF139065 BG681115 BG740377 BI712964 BG000656 AA128470 BI438324 H27408 BE931630 BE167165 AW370827 |
| | | AW370813 J05211 BG698865 BG740734 BG680618 BG739778 BI765807 BM353403 BM353248 AW177784 AW205789 AW951576 |
| | | AW848592 BE182164 BF149266 BE940187 BI060445 BI060444 BF350983 BE720095 BE720069 BE715154 BE082584 BE082576 |
| | | BE004047 AA857316 BI039774 BE713818 BE713548 AW170253 BE160433 BI039775 AW886475 BM462504 BE931734 BF149264 |
| | | AA340777 BF381183 BG621737 AU127260 AW364859 BF993352 BG223489 BE819009 BF381184 BE715956 R58704 AA852212 |
| | | AW366566 BI090358 BF087707 BE819046 BE819005 AA377127 BE073467 BE819069 BE819048 BI036306 BG990973 BI040954 |
| | | BF919911 AU140155 AI951766 AI434518 AW804674 BF752969 BE837009 BE925826 BF149265 AW995615 BE814264 BI039782 AU140407 BE144243 BE709863 BF985642 |
| | | BE001923 BF933510 AW265328 BG436319 BE182166 AW365175 AW847688 BE818280 |
| | | AW177933 BF873679 AW178000 BE082526 BF476866 BF086994 BF592276 BE082507 BE082514 BE082505 BF873693 AW068840 |
| | | AW847678 BF804153 AW365157 BE813930 BE002030 AW365153 BE184941 BF749421 BE184920 BF839562 BE184933 BF842254 |
| | | BE698470 BE931048 BF999889 BF368816 BE184924 BE159646 BE714632 BE184948 BG986845 AA131128 AA099891 W39488 C04715 |
| | | BF096124 BE865341 AW799304 AL603116 BE149760 BE705967 BE705966 BE705968 AW848723 AW376699 AW376817 AW376697 |
| | | BG005097 BF751115 BE696084 AW848371 AW376782 AW848789 AW849074 AW361413 BF927725 BF094211 AW997139 BE865474 |
| | | BE185187 BE156621 BE715089 BE713297 BE713298 BE179915 AW799309 BF872345 BF088676 BE705939 AW752599 BG005197 |
| | | BF350086 BE715196 BE715155 BF752396 BF093817 BF831190 BF752409 BE006561 BG959922 BF094833 BF094748 BF094583 |
| | | AW377699 AW607238 BE082519 AW377700 BF349467 AI190590 AI554403 AI392926 AU158477 BI467252 AU159919 AI760816 BF082516 |
| | | AI439101 AA451923 AI340326 AI590975 BI791553 AI700963 AI142882 AA039975 AA946936 AA644381 BM314884 AA702424 AI417612 AW190555 AI220573 AI304772 |
| | | AI270345 AI627383 AA552300 AI911702 AW166807 AI346078 W95070 AA149191 AA026864 AI830049 |
| | | AW780435 AI078449 AI819984 AI858282 BI468588 AI860584 AI025932 AA026047 AA703232 AA658154 AA515500 AW192085 AA918281 |
| | | T77861 AI927207 AI205263 BF082491 AW021347 AI568096 BE939862 AA088866 D12062 AA056527 AA782109 W19287 W02156 |
| | | AW150038 AA022701 T87181 H44405 AI910434 BF082513 AI494069 AI270027 AI635878 AA128330 BG681425 BE706078 R20904 |
| | | BG680059 BG676647 BF764409 AA026654 AV745530 BI762796 BG287391 AW798780 BE706045 BE926470 AW799118 BF087996 |
| | | BE002273 AW879451 AI571075 BE067786 AV721320 AI022862 N29754 C03378 N84767 AA131077 H30146 BE714290 AI686869 |
| | | AI568892 AI915596 AW105614 AI887258 AI538577 BE926474 BE067737 BG319486 AA247685 AW798883 AW103521 BF989173 |
| | | AW860878 BE939707 BE185750 BE714064 BE713903 BE713868 BE713763 BG950164 BE713810 AW365151 BG955489 BE005272 |
| | | BF915937 AW365148 AI905927 BF992780 AW853812 BG954443 BI770853 BG679406 BG740832 BG681087 BG698430 AA455100 |
| | | T87267 BE696209 BE696210 BI089483 BE006273 BE872225 AW391912 BE925515 BG677012 BG741970 AA026480 BE705999 |
| | | BG677157 BE009090 BG681378 BE712291 BG961498 BG678984 BI040941 AA337270 AW384371 AW847442 BI058659 BE813665 |
| | | W95048 W25458 AW177786 AA025851 BE931733 BF154837 BG949393 BE714441 AW996245 BE711801 AI284090 BE064323 BE719390 BE940148 BG991212 BF375714 |
| | | BF349522 BG996267 T48793 BI013292 BE001925 AW365156 AW365154 AW606653 BF763109 |
| | | BE931637 BE167181 BE713879 BF354008 BF678726 H90899 AW365145 W38382 AI498487 |
| 454516 | 1058492_1 | AW803413 AW803403 AW803466 AW803268 AW803341 AW803402 AW803334 AW803355 AW803265 AW803414 AW803396 |
| 447782 | 2392961_1 | W29040 AI668903 AI424446 |
| 413645 | 1234345_1 | AA130992 AW969537 AA503835 |
| 410840 | 1061234_1 | AW806924 AW866478 AW866473 AW866390 AW866309 BF373982 AW866298 AW866539 AW866521 AW866547 AW866454 AW866537 |
| | | AW866517 BF373957 BF373949 AW866403 AW866369 |
| 437818 | 2512063_1 | AA769054 AA778197 |
| 406687 | 0_0 | M31126 |
| 400133 | 2368_1 | NM_005648 BC013809 L34587 BF103775 BG702618 BG716553 BI667090 BG505863 BF983483 BG718195 BI857891 BG501016 |
| | | BM043599 AL521812 BG705730 BI495545 BI495546 BF112248 BM023182 BM023123 AI075173 AW051799 BF058224 BI324885 |
| | | BF436008 AA398446 BG822375 BM019558 BM023382 BG164174 N56909 BI467064 BM023464 AI207475 BM311415 BG758430 |
| | | BG758807 AI934826 N90351 BG422026 BE910312 AI027778 AI081950 AI360890 BM009115 AI191829 BG759697 AI138728 AA399403 |
| | | AI355589 AI336427 AA868702 AA393660 AA025127 BG027630 AA962774 AA631224 BG940967 BE791087 AA573315 W81685 AA393525 |
| | | BG944103 AI339125 AI149864 AA977655 N90314 BE612839 BG491847 AI129091 AA461234 AA781198 AA759256 AA888954 AA975844 |
| | | AI184099 AI018025 AA398363 AI003331 AI193380 AA626020 AI244476 AI601114 AW135664 AI206607 AW263599 AA813219 AI684453 |
| | | AA878626 AA772222 AI085496 AI630226 BG940966 AI022010 AA770649 AA887624 AA491739 AA974295 BG530040 AA037091 |
| | | AA019912 BI160457 H64512 BG503896 |
| 400219 | 8366_1 | BC003552 L10284 NM_001746 AJ271880 BI834281 BI597016 AU133331 BI668332 BI463073 BG720694 AL046729 BI460138 BI461052 |
| | | AV647588 BG823268 AW889757 BE001258 AA312566 AA476446 AU098976 AA312196 BF749977 M94859 AF070646 BG564196 |
| | | BG623597 AU117332 BG680963 BI667083 AU134542 AU138830 AI761759 BG679882 AA209406 AW512644 AW514813 AI570535 |
| | | BE547592 BG655418 AI459204 BF725673 BE870032 BF001968 AL047245 BF724470 BF058818 H18415 BE076849 BE076857 BE076848 |
| | | BE076827 BE076856 AV708687 AA380923 BE076851 F08118 L18887 BF795701 AU128383 BE908383 AW673350 AW500108 BE079837 |
| | | BE929419 BF868758 AW503373 AW580528 BE005524 BI917505 BI457781 BE883812 BI668159 AA213643 AA374821 BF969974 BM480200 AU136152 BE395635 AV685066 |
| | | AV693755 AL040984 AA676820 BG896408 BE082272 BE082312 C05287 BE082264 |
| | | AA379850 AW672902 AI625955 BF033526 AW296557 AA728815 BE077058 AW081700 AA911707 AA362640 BE707179 BG913228 |
| | | BG116191 BG752367 AA074678 AL036937 BG113760 H03524 BG681802 AI564688 AU149556 BE178600 AI813488 AI452433 AI208989 |
| | | AA599392 AA580385 AA486274 AA629899 AA565929 AA114046 AA094252 BM450328 BG529968 R68320 BE076792 BE090073 |
| | | BE076855 BE076859 BE076829 AA361719 AA379164 AI202712 BG223315 BE122741 BG534531 AA903494 H24978 BF032674 BF085150 |
| | | BE739158 AA352904 C21593 BG697597 AA134969 AA374612 BE566182 BE871838 BE076911 AW579175 BF966390 BI548594 BG386452 BG913195 BM456787 N40286 |
| | | T80096 N39642 H42119 BG483861 AW381621 R69347 AW128895 AI367416 AI095285 AA099344 |
| | | BE568161 AA180109 BF246488 BI561938 AW579170 BG567212 |
| 412999 | 1343220_1 | BE046255 BE046611 BE046716 BE046732 BE046273 |
| 421258 | 266882_1 | AA286731 AA287621 AW188228 AW137774 BF902638 |
| 414390 | 2128_2 | BC022204 AK027690 NM_032839 BI765386 BE903404 BG700172 BF701671 BG252600 W60255 AW301576 W01296 AV724003 |
| | | BE999965 AI949788 BM040799 Z43693 BF082768 BF328302 H09192 BF332781 R34999 BG573394 N57281 BE009522 BE281040 |
| 458215 | 540112_3 | BE176902 BE177058 |
| 445511 | 9560_8 | BM471219 BE093160 BG171761 BI254009 AI905474 AA453162 AA829759 AI086559 AA776022 AI377446 BF589018 AA452822 |
| | | AW614566 AA443880 AA476733 AW970674 AI393291 AA988283 AI905528 AW384956 D78656 |
| 452470 | 40652_4 | AI903246 AI903467 AI903463 AI903248 AI903465 AI903243 |
| 439932 | 2601510_1 | AI589851 AI741578 AI359930 AI820062 AI742528 AA854682 AI038485 |
| 449016 | 1500732_1 | BE616111 BE081323 BE615864 |
| 423077 | 147641_1 | AW964587 BF737224 AA321699 AV740801 BI005365 N44978 |
| 459234 | 14095_−17 | AI940425 |
| 413402 | 151905_1 | T24065 BE092516 BE091995 BE092527 BE092284 BE092271 BE092204 BF332633 BE092280 BE092202 BE091991 BE091994 BF742886 |
| | | BF332627 BF332636 BE092068 BF742885 BE092063 BE092528 BE092447 BE092065 BE092283 BE092514 |
| 432492 | 715602_1 | AW275110 AA551054 AW867407 AW867499 BF374039 |
| 458422 | 4340_3 | NM_006260 BE048475 AW080036 AA287317 AA400028 AI204437 AI830642 AA644420 AW614662 AW261942 U28424 BG335330 |
| | | AU148480 AI095508 BF727387 BG256497 AI521859 AW291686 AW007816 BG002833 AA853075 AA779079 BF082050 AI640393 |
| | | AA522954 T55310 AW517649 AA127463 AA887984 AW206341 BE858004 AW772531 AA604169 H83777 BG290990 AI692188 AI223311 |
| | | AI708839 D82262 AA600260 AI364786 AA471007 |
| 434636 | 15423_1 | AJ420454 AF147430 AA910497 BF432963 AI701451 AI743089 AA429326 AI887812 AA315932 AI005464 AL043321 AI300993 AA425105 |
| | | BE467230 BE669770 AA885637 BE503044 AW014324 AI809584 AW167510 AA921331 AA903224 W01644 AI762128 AA031404 BE550653 |
| | | AI694045 BE043088 BE670430 AI630969 AI457315 BE644737 BE327316 AW295247 N92784 AI630807 BE328180 AI269949 AW245292 |
| | | AA083765 AA256898 AI375535 AA430673 AI168735 AI589717 AA015942 AI693885 AW341205 AA931651 BF856764 BE468094 BF433393 |
| | | BF445511 AA928976 AI817684 BF111008 AA428316 AA455858 N25716 AA568727 AI581817 AA427482 H40678 AA041483 N71630 |
| | | H51826 BF969052 AA094470 AI560352 T98937 W52816 AA083764 |
| 456487 | 8963_2 | AF064804 AA903211 AA829283 W05727 T30970 T32140 AI798807 BG218634 AW070452 AI767005 BF197394 BG202323 BG190077 |
| | | AA013172 T98542 AL567878 |

Pkey: Unique Eos probeset identifier number
CAT number: Gene cluster number
Accession: Genbank accession numbers

[0372] TABLE 12C

| Pkey | Ref | Strand | Nt_position |
|---|---|---|---|
| 401451 | 6634068 | Minus | 119926-121272 |
| 405770 | 2735037 | Plus | 61057-62075 |
| 401197 | 9719705 | Plus | 176341-176452 |
| 401519 | 6649315 | Plus | 157315-157950 |
| 406399 | 9256288 | Minus | 63448-63554 |
| 401866 | 8018106 | Plus | 73126-73623 |
| 404568 | 9966995 | Minus | 92893-93116 |
| 404561 | 9795980 | Minus | 69039-70100 |
| 403485 | 9966528 | Plus | 2888-3001, 3198-3532, |
| | | | 3655-4117 |
| 402812 | 6010110 | Plus | 25026-25091, 25844-25920 |
| 401464 | 6682291 | Minus | 170688-170834 |
| 406181 | 5923650 | Plus | 16586-16855 |
| 404996 | 6007890 | Plus | 37999-38145, 38652-38998, |
| | | | 39727-39872, 4055 |
| 402802 | 3287156 | Minus | 53242-53432 |
| 402408 | 9796239 | Minus | 110326-110491 |
| 402053 | 8083229 | Plus | 62703-63179 |
| 401558 | 7139678 | Plus | 103510-104090 |
| 402496 | 9797769 | Minus | 8615-9103 |
| 404704 | 9800728 | Minus | 88841-89018 |
| 403127 | 9211333 | Minus | 123813-124035 |
| 404632 | 9796668 | Plus | 45096-45229 |
| 404571 | 7249169 | Minus | 112450-112648 |
| 402114 | 8318586 | Plus | 71578-71715 |
| 405204 | 7230116 | Plus | 126569-126754 |
| 402855 | 9662953 | Minus | 59763-59909 |
| 403817 | 8962065 | Plus | 110297-111052 |
| 406081 | 9123861 | Minus | 38115-38691 |
| 406304 | 8575869 | Plus | 98839-98943, 105865-106005 |
| 400884 | 9958187 | Minus | 57979-58189 |
| 404995 | 6006247 | Minus | 154015-154123 |
| 400583 | 9887611 | Minus | 201148-201272 |
| 402537 | 9801061 | Minus | 111945-112220, 112466-112741 |
| 401560 | 8122921 | Plus | 94912-95082 |
| 404148 | 9863703 | Plus | 78218-78418, 79571-79709 |
| 404891 | 7329392 | Plus | 84974-85125 |
| 403416 | 9438737 | Plus | 21296-21453 |
| 405031 | 7533980 | Plus | 142468-142830 |
| 401216 | 8077122 | Minus | 154722-154944 |
| 403851 | 7708872 | Plus | 22733-23007 |
| 401203 | 9743387 | Minus | 172961-173056, 173868-173928 |
| 404440 | 7528051 | Plus | 80430-81581 |
| 405942 | 6758796 | Minus | 17579-18157 |
| 403011 | 6693597 | Minus | 3468-3623 |
| 403882 | 7710258 | Plus | 60805-60997, 62455-62559 |
| 403532 | 8076842 | Minus | 81750-81901 |
| 401435 | 8217934 | Minus | 54508-55233 |
| 400965 | 7770576 | Minus | 173043-173564 |
| 402025 | 7547159 | Plus | 173835-173998 |
| 404173 | 9930908 | Minus | 51303-51635 |
| 404819 | 4678240 | Plus | 16223-16319, 16427-16513, |
| | | | 16736-16859, 1694 |
| 402270 | 3108020 | Plus | 117656-117822 |
| 404607 | 7328770 | Plus | 28477-28591 |
| 405366 | 2182280 | Plus | 22478-22632 |
| 404624 | 9796168 | Minus | 92857-93081 |
| 404901 | 7331453 | Plus | 22679-22837, 27864-28108 |
| 406137 | 9166422 | Minus | 30487-31058 |
| 406303 | 8575868 | Plus | 173622-173786 |
| 403848 | 7708855 | Minus | 26695-26912 |
| 402261 | 2887496 | Plus | 2872-3032, 4673-4847, 12749-12886 |
| 400821 | 8570338 | Plus | 7188-7393 |
| 400857 | 9739340 | Minus | 44729-44873 |
| 403671 | 7272159 | Plus | 104461-104701 |
| 402280 | 2795792 | Plus | 16831-17570 |
| 405976 | 8247789 | Minus | 126103-126874 |
| 406203 | 7289992 | Minus | 82220-82639 |
| 402609 | 9926446 | Minus | 113464-113633, 114264-114654 |
| 402927 | 8217647 | Minus | 47247-47396 |
| 403324 | 8440025 | Minus | 107104-107309 |
| 400528 | 6981824 | Plus | 472381-472528, 474170-474277, |
| | | | 475328-47554 |
| 404478 | 8096498 | Minus | 65417-65625 |
| 402265 | 3287673 | Plus | 21059-21168 |
| 401796 | 7321653 | Minus | 36356-36533 |
| 401783 | 7249190 | Plus | 139369-139827, 140509-140591, |
| | | | 140834-14099 |
| 402553 | 9863566 | Plus | 48292-48398, 49564-49944 |
| 405558 | 1621110 | Plus | 4502-4644, 5983-6083 |
| 404576 | 4020145 | Plus | 17309-17938 |
| 401924 | 3892083 | Minus | 129614-129831, 130489-130614, |
| | | | 130696-13085 |
| 406389 | 9256209 | Minus | 48376-48504, 50635-50763, |
| | | | 52935-53063, 5601 |
| 404156 | 9886577 | Plus | 127319-127754 |
| 404580 | 6539738 | Minus | 240588-241589 |
| 405418 | 6997292 | Plus | 51839-51953 |
| 403291 | 7230870 | Plus | 95177-95435 |
| 400995 | 8099094 | Plus | 141186-141601 |
| 405357 | 2133873 | Minus | 4536-4604, 5297-5392 |
| 403055 | 8748904 | Minus | 109532-110225 |
| 402102 | 8117771 | Minus | 174566-174740 |
| 401759 | 9929699 | Plus | 59811-60665 |
| 405510 | 7630909 | Minus | 101028-101174 |
| 402842 | 9369121 | Minus | 76355-76479 |
| 401696 | 3417290 | Minus | 46209-46401 |
| 405484 | 5922025 | Plus | 199214-199579, 199672-199920, |
| | | | 200262-20049 |
| 405010 | 6094622 | Plus | 28830-29050 |
| 405704 | 4204244 | Plus | 138842-139051 |
| 403167 | 9838127 | Plus | 162599-162935 |
| 405276 | 4079595 | Minus | 40060-40215 |
| 403349 | 8569773 | Minus | 167815-168374 |
| 405451 | 7622517 | Minus | 145949-146227 |
| 403961 | 7596976 | Minus | 110393-110603 |
| 405863 | 7657810 | Plus | 49410-49620 |
| 405258 | 7329310 | Plus | 129930-130076 |
| 402412 | 7408036 | Plus | 75075-75679 |
| 400567 | 9884730 | Plus | 72252-72396 |
| 404109 | 9211742 | Minus | 144675-144928, 151899-152064 |
| 405723 | 9801668 | Plus | 114896-115831 |
| 404120 | 7342152 | Plus | 135775-136000 |
| 402285 | 2689079 | Minus | 92386-92634 |
| 400817 | 8569994 | Plus | 170793-170948 |
| 402505 | 9797871 | Plus | 27326-28231 |
| 405215 | 7230201 | Minus | 61683-61808 |
| 402008 | 6630597 | Plus | 164419-164809 |
| 405387 | 6587915 | Minus | 3769-3833, 5708-5895 |
| 405573 | 3820491 | Minus | 32645-33144 |
| 402663 | 8077020 | Minus | 14155-14364 |
| 401917 | 9502466 | Plus | 25054-25229 |
| 404494 | 8151634 | Minus | 53604-53893 |
| 400639 | 9887597 | Plus | 23150-23580 |
| 405705 | 4165009 | Plus | 120228-120800 |
| 404423 | 7407959 | Plus | 34438-34618 |
| 401913 | 9369520 | Minus | 33753-33904 |
| 405028 | 7533974 | Minus | 110588-110847, 110933-111115 |
| 402189 | 8576043 | Minus | 128318-129601 |
| 401804 | 7331475 | Minus | 154865-155024 |
| 402229 | 9965022 | Minus | 15739-15951, 16166-16779 |
| 404877 | 1519284 | Plus | 1095-2107 |
| 404341 | 7630856 | Minus | 13527-14130 |
| 401160 | 6067118 | Minus | 8280-8945 |
| 401925 | 3892083 | Minus | 138252-138469, 140239-140364, |
| | | | 140437-14059 |
| 406374 | 9256132 | Plus | 58991-59137 |
| 402530 | 7630937 | Minus | 1524-2003 |
| 403332 | 8568139 | Minus | 31409-31674 |
| 401952 | 3319121 | Minus | 53770-53979 |
| 402819 | 6729581 | Plus | 29217-29422 |
| 402014 | 7417799 | Plus | 36641-37171 |
| 403549 | 8081591 | Minus | 137150-137362 |
| 403481 | 9965004 | Plus | 93496-93633 |
| 401438 | 4885691 | Minus | 72461-72605 |
| 403429 | 9719566 | Minus | 52789-52917 |
| 403154 | 7407986 | Minus | 14228-14736 |
| 403858 | 7708944 | Plus | 37262-37517 |
| 400540 | 7574902 | Plus | 116601-116700, 119129-119312, |
| | | | 122026-12218 |
| 401403 | 7710966 | Plus | 146180-146294 |
| 406423 | 9256411 | Plus | 165600-165824 |
| 401711 | 6682593 | Minus | 19740-19938 |
| 402942 | 9368398 | Plus | 102152-102386 |
| 401138 | 2547238 | Plus | 3897-4121 |
| 406237 | 7417725 | Plus | 30032-30501 |
| 402322 | 7630359 | Minus | 75078-75203 |
| 404661 | 9797073 | Plus | 33374-33675, 33769-34008 |
| 405673 | 4589984 | Plus | 50700-50842 |
| 405869 | 6758731 | Minus | 89867-90358 |
| 406261 | 5686411 | Minus | 9906-10594 |
| 401708 | 2951946 | Plus | 154511-155298 |
| 402704 | 8782736 | Plus | 37368-37493 |
| 400987 | 8086488 | Minus | 22052-22185 |
| 404029 | 7671252 | Plus | 108716-111112 |
| 406596 | 8248613 | Minus | 128312-128539 |
| 405850 | 6164995 | Plus | 13871-14110 |
| 404745 | 6981829 | Plus | 101968-102920 |
| 401908 | 8698760 | Minus | 126888-127024 |
| 405365 | 2275192 | Minus | 119867-120372, 120481-120824, |
| | | | 121029-12135 |
| 405883 | 6758747 | Plus | 60621-61193 |
| 401095 | 9965511 | Plus | 140224-140501, 141208-141373 |
| 402840 | 9369121 | Minus | 57118-57306 |
| 406255 | 7417729 | Plus | 2959-3200 |
| 404306 | 5679453 | Plus | 32024-32174, 32823-32927 |
| 404053 | 3548785 | Plus | 61797-64205 |
| 400834 | 8705192 | Plus | 121963-122288 |
| 401192 | 9719502 | Minus | 69559-70101 |
| 405760 | 6066938 | Minus | 37424-38045 |
| 404071 | 7210053 | Minus | 167354-167859, 168810-168920, |
| | | | 169000-16910 |
| 404754 | 7637341 | Plus | 57788-57931, 59369-59525, |
| | | | 77040-77131, 7930 |
| 405710 | 5531256 | Minus | 66203-66832 |
| 405779 | 7280331 | Minus | 33048-33856 |
| 400880 | 9931121 | Plus | 29235-29336, 36363-36580 |
| 405697 | 4309923 | Minus | 56765-57010, 57696-58016 |
| 401898 | 8570008 | Minus | 72013-72132, 72400-72487 |
| 403509 | 7630896 | Plus | 144706-144901 |
| 401463 | 6682291 | Minus | 163135-163262 |
| 400730 | 8118960 | Plus | 11434-11748 |
| 403794 | 8096910 | Plus | 163292-163884 |
| 404496 | 8151634 | Plus | 145065-145179 |
| 400547 | 9801025 | Plus | 41505-42032 |
| 406542 | 7711499 | Plus | 117335-118473 |
| 401405 | 7768126 | Minus | 69276-69452, 69548-69958 |
| 400845 | 9188605 | Plus | 34428-34612 |
| 403935 | 7454203 | Plus | 16955-17310 |
| 404705 | 9800794 | Minus | 75671-75910 |
| 404592 | 9943965 | Minus | 39067-39225 |
| 402239 | 7690131 | Plus | 38175-38304, 42133-42266 |
| 402889 | 9931133 | Plus | 89392-89498, 90358-90571 |
| 400750 | 8119067 | Plus | 198991-199168, 199316-199548 |

Pkey: Unique number corresponding to an Eos probeset
Ref: Sequence source. The 7 digit numbers in this column are Genbank Identifier (GI) numbers. “Dunham I. et al.” refers to the publication entitiled “The DNA sequence of human chromosome 22.” Dunham I. et al., Nature (1999) 402: 489-495.
Strand: Indicates DNA strand from which exons were predicted.
Nt_position: Indicates nucleotide positions of predicted exons.

[0373] It is understood that the examples described above in no way serve to limit the true scope of this invention, but rather are presented for illustrative purposes. All publications, sequences of accession numbers, and patent applications cited in this specification are herein incorporated by reference as if each individual publication or patent application were specifically and individually indicated to be incorporated by reference.

The application's sequence listing, which the Patent Office published only in electronic form, follows.

SEQUENCE LISTING (5818 sequences)

SEQ ID NO: 1 - DNA, 3647 bp, Homo Sapiens
agtgaatcggaaaggaggcgccggctgtggcggcggcgggagctgctcggaagctacacctcgcaagggctcccccctttccccaccccctcccccgacccttttcccctccccgggccacccagcccgcccaactcccagcggagagcaaggttttcttctgttttcatagccagccagaacaatgttctacgcacattttgttctcagtaaaagagggcctctggccaaaatttggctagcggcccattgggataagaagctaaccaaagcccatgtgttcgagtgtaatttagagagcagcgtggagagtatcatctcaccaaaggtgaaaatggcattacggacatcaggacatctcttactgggagtagttcgaatctatcacaggaaagccaaataccttcttgcagactgtaatgaagcattcattaagataaagatggcttttcggccaggtgtggttgacctgcctgaggaaaatcgggaagcagcttataatgccattactttacctgaagaatttcatgactttgatcagccactgcctgacttagatgacatcgatgtggcccagcagttcagcttgaatcagagtagagtggaagagataaccatgagagaagaagttgggaacatcagtattttacaagaaaatgattttggtgattttggaatggatgatcgtgagataatgagagaaggcagtgcttttgaggatgacgacatgttagtaagcactactacttctaacctcctattagagtctgaacagagcaccagcaatctgaatgagaaaattaaccatttagaatatgaagatcaatataaggatgataattttggagaaggaaatgatggtggaatattagatgacaaacttattagtaataatgatggcggtatctttgatgatccccctgccctctctgaggcaggggtgatgttgccagagcagcctgcacatgacgatatggatgaggatgataatgtatcaatgggtgggcctgatagtcctgattcagtggatcccgttgaaccaatgccaaccatgactgatcaaacaacacttgttccaaatgaggaagaagcatttgcattggagcctattgatataactgttaaagaaacaaaagccaagaggaagaggaagctaattgttgacagtgtcaaagagttggatagcaagacaattagagcccaacttagtgattattcagatattgttactactttggatctggcaccgcccaccaagaaattgatgatgtggaaagagacaggaggagtagaaaaactgttttctttacctgctcagcctttgtggaataacagactactgaagctctttacacgctgtcttacaccgcttgtaccagaagaccttagaaaaaggaggaaaggaggagaggcagataatttggatgaattcctcaaagaatttgaaaatccagaggttcctagagaggaccagcaacagcagcatcagcagcgtgatgttatcgatgagcccattattgaagagccaagccgcctccaggagtcagtgatggaggccagcagaacaaacatagatgagtcagctatgcctccaccaccacctcagggagttaagcgaaaagctggacaaattgacccagagcctgtgatgcctcctcagcaggtagagcagatggaaataccacctgtagagcttcccccagaagaacctccaaatatctgtcagctaataccagagttagaacttctgccagaaaaagagaaggagaaagagaaggaaaaagaagatgatgaagaggaagaggatgaagatgcatcagggggcgatcaagatcaggaagaaagaagatggaacaaaaggactcagcagatgcttcatggtcttcagcgtgctcttgctaaaactggagctgaatctatcagtttgcttgagttatgtcgaaatacgaacagaaaacaagctgccgcaaagttctacagcttcttggttcttaaaaagcagcaagctattgagctgacacaggaagaaccgtacagtgacatcatcgcaacacctggaccaaggttccatattatataaggagctagaagcattatagctagtgtttgattcactagtgcttacaaattgcccccatgtgtaggggacacagaaccctttgagaaaacttagatttttgtctgtacaaagtctttgcctttttccttcttcatttttttccagtacattaaatttgtcaatttcatctttgagggaaactgattagatgggttgtgtttgtgttctgatggagaaaacagcaccccaaggactcagaagatgattttaacagttcagaacagatgtgtgcaatattggtgcatgtaataatgttgagtggcagtcaaaagtcatgatttttatcttagttcttcattactgcattgaaaaggaaaacctgtctgagaaaatgcctgacagtttaatttaaaactatggtgtaagtctttgacaagaaaaaaaaacaaacaaacacttctttccatcagtaacactggcaatcttcctgttaaccactctccttagggatggtatctgaaacaacaatggtcaccctcttgagattcgttttaagtgtaattccataatgagcagaggtgtacgcgaaattgtgttatgactgatagccttcagctacaaaaagataggactgacctggtttaaagtgttctattttgtaaatcattccatttgagtctttctgatgaacttggctatactgaaatctgttattttagtgaggctccaaaatgagcaaagctaggcctgattagagtagagtgactattaaaaaacataactttctaggagctataaatcaaagttttaaaaagatgtttggatatatttgagtattccgatcatgaaaacagaaattgccctgcctactacaaggacagactgatgggaaattatgcacctggtcaacttagcttttaagcagacgatgctgtaaaaactaacggcttctctgatatttattgtaagttttagtactgatctccttttccagtgctgcacactcctggtttggaactttaatagcgttgcaacgaaatcctatatccagtttcctgtaatttaattgaagaaaaatacatccaaataaagactttattattaacagaccagatagcatcagaaatcatgtgactgttatgattatcagaatatgtcttaactttttagggcaaagttaacactgaaagttctagcttaagtgttgaaacttttgtgggaaaaaaaaatcacttttgaaactcagacttcagtgtatacccaataatttaaaattatgtgaaatgttttaaatttgtgaactcgtaattactgttttaatgattcagtttcttcagagtggtaattgtataaaattgctattgcagctttatattcaatatgatgtgcctgtaaaccaaggagttttccccgtttgtaaaaagacattgtagataattgaatgtttgattttagaaaggtcattagtttcttgttacacattttgttagtctggtttttgttgcttatcgggtttaatattgttcttgaaaatagttgatgctatgttatgtataacttttctaataaaagttgtgttataagctgt

SEQ ID NO: 2 - DNA, 3889 bp, Homo Sapiens
gagactgagtattctaccttgtaaatactgttatttgtatatactgtaaatgatgacatcggtgggcactaaccgagcccggggaaactgggaacaacctcaaaaccaaaaccagacacagcacaagcagcggccacaggccactgcagaacaaattagacttgcacagatgatttcggaccataatgatgctgactttgaggagaaggtgaaacaattgattgatattacaggcaagaaccaggatgaatgtgtgattgctttgcatgactgcaatggagatgtcaacagagctatcaatgttcttctggaaggaaacccagacacgcattcctgggagatggtcgggaagaagaagggagtctcaggccagaaggatggtggccagacggaatccaatgaggaaggcaaagaaaatcgagaccgggacagagactatagtcggcgacgtggtgggccaccaagacgggggagaggtgccagccgtggacgagagtttcgaggtcaggaaaatggattggatggcaccaagagtggagggccttctggaagaggaacagaaagaggcagaaggggccgtggccgaggcagaggtggctctggtaggcgaggaggaaggttttctgctcaaggaatgggaacctttaacccagctgattatgcagagccagccaatactgatgataactatggcaatagcagcggcaatacgtggaacaacactggccactttgaaccagatgatgggacgagtgcatggaggactgcaacagaggagtgggggactgaagattggaatgaagatctttctgagaccaagatcttcactgcctctaatgtgtcttcagtgcctctgcctgcggagaatgtgacaatcactgctggtcagagaattgaccttgctgttctgctggggaagacaccatctacaatggagaatgattcatctaatctggatccgtctcaggctccttctctggcccagcctctggtgttcagtaattcgaagcagactgccatatcacagcctgcttcagggaacacattttctcatcacagtatggtgagcatgttagggaaaggatttggtgatgtcggtgaagctaaaggcggcagtactacaggctcccagttcttggagcaattcaagactgcccaagccctggctcagttggcagctcagcattctcagtctggaagcaccaccacctcctcttgggacatgggctcgacgacacaatccccatcactggtgcagtatgatttgaagaacccaagtgattcagcagtgcacagcccctttacaaagcgccaggcttttaccccatcttcaaccatgatggaggtgttccttcaggagaagtcacctgcagtggctacctccacagctgcacctccacctccgtcttctcctctgccaagcaaatccacatcggctccacagatgtcgcctggatcttcagacaaccagtcctctagccctcagccggctcaccagaaactgaaacagcagaagaaaaaagcctccttgacttctaagattcctgctctggctgtggagatgcctggctcagcagatatctcagggctaaacctgcagtttggggcattgcagtttgggtcagagcctgtcctttctgattatgagtccacccccaccacgagcgcctcttcaagccaggctccaagtagcctgtataccagcacggccagtgaatcatcctctacaatttcatctaaccagagtcaggagtctggttatcagagcggcccaattcagtcgacaacctatacctcccaaaataatgctcagggccctctttatgaacagagatccacacagactcggcggtaccccagctccatctcttcatcaccccaaaaggacctgactcaggcaaagaatggcttcagttctgtgcaggccacgcagttacagaccacacaatctgttgaaggtgctacaggctctgcagtgaaatctgattcaccttccacttctagcatcccccctctcaatgaaacggtatctgcagcttccttactgacgacaaccaatcagcattcatcctccttgggtggcttgagccacagtgaggagattccaaatactaccaccacacaacacagcagcacgttatctacgcagcagaataccctttcatcatcaacatcttctgggcgcacttcgacatccactcttttgcacacaagtgtggagagtgaggcgaatctccattcttcctccagcactttttccaccacatccagcacagtctctgcacctcccccagtggtcagtgtctcctccagtctcaatagtggcagtagcctgggcctcagcctaggcagcaactccactgtcacagcctcgactcgaagctcagttgctacgacttcaggaaaagctcctcccaacctccctcctggggtcccgccgttgttgcctaatccgtatattatggctccagggctgttacatgcctacccgccacaagtatatggttatgatgacttgcagatgcttcagacaagatttccattggattactacagcatcccatttcccacacccactactccgctgactgggagggatggtagcctggccagcaacccttattctggtgacctcacaaagttcggccgtggggatgcctcctccccagccccggccacaaccttggcccaaccccaacagaaccagacgcagactcaccataccacgcagcagacattcctgaacccggcgctgcctcctggctacagttacaccagcctgccatactatacaggggtcccgggcctccccagcaccttccagtatgggcctgctgtgttccctgtggctcctacctcttccaagcagcatggtgtgaatgtcagtgtgaatgcatcggccacccctttccaacagccgagtggatatgggtctcatggatacaacactggtgtttcagtcacctccagtaacacgggcgtgccagatatctcgggttctgtgtactccaaaacccagcagtcctttgagaaacaaggttttcattccggtactcctgctgcttccttcaacttgccttcagccctaggaagtgggggccccatcaatccggccacagctgctgcctacccacctgccccctttatgcacattctgaccccccatcagcagccgcattctcagatccttcaccatcacctgcagcaggatggccagacgggcagcgggcaacgtagccagaccagctccatcccgcagaagccccagaccaacaagtctgcctacaacagctacagctggggggccaactgaggccctgaccctcttctcccggtcccatcttctgagagggcttctcagcctggaaactatggaaacagcatcaaagagaaaggaatgtggggggtttccgctgccccccacccccagcggcccaccccatgcctcagcttcatgtctgtcccattcctataccatccccaccctgttgtatgtattataggatttgtattttctccttttttttcccccttccattccttctcccctcttgcattcaagattatgaaactttgctatgggccctgcacttcctttgcttcctcctgttcaccctggtggtgtacggatgaggcggggaggtgggacccccaaacatatatcagcccaacagccctaagtctccttctttattattaggaaaacaacaacaacaacaaacaaaaaaatggcgtcatgaatatgaacagcattgtcagatgaattagttgaagtggttttttttttgtttttttttttttttttgtactgtgtcctcaaatttaatggattaatgtgtcttgtatatataaaaagaaaacctctaccttcaaaaaaaaaaaaaaaaaa

SEQ ID NO: 3 - DNA, 2848 bp, Homo Sapiens
cgcggcactcgcgcgcgatcccggccggcggcgcgccggcgggccaggcggcgccacagcccatggagctcgagaacatcgtagcgaacacggtgctactcaaggcccgggaaggtggcggtggaaatcgcaaaggcaaaagcaagaaatggcggcagatgctccagttccctcacatcagccagtgcgaagagctgcggctcagcctcgagcgtgactatcacagcctgtgcgagcggcacgccattgggcgcctgctgttccgagagttctgtgccacgaggccggagctgagccgctgcgtcgccttcctggatggggtggccgagtatgaagtgaccccggatgacaagcggaaggcatgtgggcggcacgtaacgcagaattttctgagccacacgggtcctgacctcatccctgaggtcccccggcagctggtgacgaactgcacccagcggctggagcagggtccctgcaaagaccttttccaggaactcacccggctgacccacgagtacctgagcgtggccccttttgccgactacctcgacagcatctacttcaaccgtttcctgcagtggaagtggctggaaaggcagccagtgaccaaaaacaccttcaggcaataccgagtcctgggcaaaggtggctttggggaggtgtgcgcctgccaggtgcgggccacaggtaagatgtatgcctgcaagaagctagagaaaaagcggatcaagaagcggaaaggggaggccatggcgctgaacgagaagcagatcctggagaaagtgaacagtaggtttgtagtgagcttggcctacgcctatgagaccaaggacgcgctgtgcctggtgctgacactgatgaacgggggcgacctcaagttccacatctaccacatgggccaggctggcttccccgaagcgcgggccgtcttctacgccgccgagatctgctgtggcctggaggacctgcaccgggagcgcatcgtgtacagggacctgaagcccgagaacatcttgctggatgaccacggccacatccgcatctctgacctgggactagctgtgcatgtgcccgagggccagaccatcaaagggcgtgtgggcaccgtgggttacatggctccggaggtggtgaagaatgaacggtacacgttcagccctgactggtgggcgctcggctgcctcctgtacgagatgatcgcaggccagtcgcccttccagcagaggaagaagaagatcaagcgggaggaggtggagcggctggtgaaggaggtccccgaggagtattccgagcgcttttccccgcaggcccgctcactttgctcacagctcctctgcaaggaccctgccgaacgcctggggtgtcgtgggggcagtgcccgcgaggtgaaggagcaccccctctttaagaagctgaacttcaagcggctgggagctggcatgctggagccgccgttcaagcctgacccccaggccatttactgcaaggatgttctggacattgaacagttctctacggtcaagggcgtggagctggagcctaccgaccaggacttctaccagaagtttgccacaggcagtgtgcccatcccctggcagaacgagatggtggagaccgagtgcttccaagagctgaatgtctttgggctggatggctcagttcccccagacctggactggaagggccagccacctgcacctcctaaaaagggactgctgcagagactcttcagtcgccaagattgctgtggaaactgcagcgacagcgaggaagagctccccacccgcctctagcccccagcccgaggcccccaccagcagttggcggtagcagctactccgagcgccgtttacagttttgcacagtgatcttccccattgtccactcaagtcgtggcctggggaacacagacggagctgtccccagtgtcctccgtccctcagcccctggcctggctgagtttggcagggcctgggccatccctgggacaaaggtgcgtcccttcagctcttctccgtggagctcggggctttctgtatttatgtatttgtacgaatgtatatagcgaccagagcattcttaattcccgccgcagacctggcgcccccgccttggctcctgggggcagccagccctggctggagagcgggacgtggcagaggagccactgccaaactcaaggctcctctggcccagcttggatggctgagggtggtcacacctgagccttcagcactgtgctgccaccccggcctctgagtaagactcgtgcctccccctgctgccctgggctcaggctgctacctctggggcccaaagctgtcccttctcagtgcttgtcagcgctgggtctggggcctctgtatgccctaggcctgtgccaaagtggccagagattgggctgcctgtgatacccatcagcccactgccccggccggcccagataggtctgcctctgccttccagctcccacagcctggtccctgatactgggctctgtcctgcagacacctctttcagaaacgcccaagcccagccctaggagggggtggggcatccctggtcaaccctcaaacattccggactcccctcataacaatagacacatgtgcccagcaataatccgccccttcctgtgtgcgcctgtggggtgcgtgctctctgtgtgtacctgtgtgggtgaaggggatagggcgaggctgtgcctgtgccccaggtcccagccctggcccttcccagactgtgatggccatcctggtcccagtgttagggtagcatgggattacagggccctgttttttccatatttaaagccaatttttattactcgttttgtccaacgtaaaag

SEQ ID NO: 4 - DNA, 4354 bp, Homo Sapiens
gaattcggggggcgagtaagccagcggcaggaccagcgggcgggggccacaacaaaagctggcaggctgacagaggcggcctcaggacggaccttctggctactgaccgttttgctgtggttttcccggattgtgtgtaggtgtgagatcaaccatgagttccgttgcagttttgacccaagagagttttgctgaacaccgaagtgggctggttccgcaacaaatcaaagttgccactctaaattcagaagaggagagcgaccctccaacctacaaggatgccttccctccacttcctgagaaagctgcttgcctggaaagtgcccaggaacccgctggagcctgggggaacaagatccgacccatcaaggcttctgtcatcactcaggtgttccatgtacccctggaggagagaaaatacaaggatatgaaccagtttggagaaggtgaacaagcaaaaatctgccttgagatcatgcagagaactggtgctcacttggagctgtctttggccaaagaccaaggcctctccatcatggtgtcaggaaagctggatgctgtcatgaaagctcggaaggacattgttgctagactgcagactcaggcctcagcaactgttgccattcccaaagaacaccatcgctttgttattggcaaaaatggagagaaactgcaagacttggagctaaaaactgcaaccaaaatccagatcccacgcccagatgaccccagcaatcagatcaagatcactggcaccaaagagggcatcgagaaagctcgccatgaagtcttactcatctctgccgagcaggacaaacgtgctgtggagaggctagaagtagaaaaggcattccaccccttcatcgctgggccgtataatagactggttggcgagatcatgcaggagacaggcacgcgcatcaacatccccccacccagcgtgaaccggacagagattgtcttcactggagagaaggaacagttggctcaggctgtggctcgcatcaagaagatttatgaggagaagaaaaagaagactacaaccattgcagtggaagtgaagaaatcccaacacaagtatgtcattgggcccaagggcaattcattgcaggagatccttgagagaactggagtttccgttgagatcccaccctcagacagcatctctgagactgtaatacttcgaggcgaacctgaaaagttaggtcaggcgttgactgaagtctatgccaaggccaatagcttcaccgtctcctctgtcgccgccccttcctggcttcaccgtttcatcattggcaagaaagggcagaacctggccaaaatcactcagcagatgccaaaggttcacatcgagttcacagagggcgaagacaagatcaccctggagggccctacagaggatgtcaatgtggcccaggaacagatagaaggcatggtcaaagatttgattaaccggatggactatgtggagatcaacatcgaccacaagttccacaggcacctcattgggaagagcggtgccaacataaacagaatcaaagaccagtacaaggtgtccgtgcgcatccctcctgacagtgagaagagcaatttgatccgcatcgagggggacccacagggcgtgcagcaggccaagcgagagctgctggagcttgcatctcgcatggaaaatgagcgtaccaaggatctaatcattgagcaaagatttcatcgcacaatcattgggcagaagggtgaacggatccgtgaaattcgtgacaaattcccagaggtcatcattaactttccagacccagcacaaaaaagtgacattgtccagctcagaggacctaagaatgaggtggaaaaatgcacaaaatacatgcagaagatggtggcagatctggtggaaaatagctattcaatttctgttccgatcttcaaacagtttcacaagaatatcattgggaaaggaggcgcaaacattaaaaagattcgtgaagaaagcaacaccaaaatcgaccttccagcagagaatagcaattcagagaccattatcatcacaggcaagcgagccaactgcgaagctgcccggagcaggattctgtctattcagaaagacctggccaacatagccgaggtagaggtctccatccctgccaagctgcacaactccctcattggcaccaagggccgtctgatccgctccatcatggaggagtgcggcggggtccacattcactttcccgtggaaggttcaggaagcgacaccgttgttatcaggggcccttcctcggatgtggagaaggccaagaagcagctcctgcatctggcggaggagaagcaaaccaagagtttcactgttgacatccgcgccaagccagaataccacaaattcctcatcggcaaggggggcggcaaaattcgcaaggtgcgcgacagcactggagcacgtgtcatcttccctgcggctgaggacaaggaccaggacctgatcaccatcattggaaaggaggacgccgtccgagaggcacagaaggagctggaggccttgatccaaaacctggataatgtggtggaagactccatgctggtggaccccaagcaccaccgccacttcgtcatccgcagaggccaggtcttgcgggagattgctgaagagtatggcggggtgatggtcagcttcccacgctctggcacacagagcgacaaagtcaccctcaagggcgccaaggactgtgtggaggcagccaagaaacgcattcaggagatcattgaggacctggaagctcaggtgacattagaatgtgctataccccagaaattccatcgatctgtcatgggccccaaaggttccagaatccagcagattactcgggatttcagtgttcaaattaaattcccagacagagaggagaacgcagttcacagtacagagccagttgtccaggagaatggggacgaagctggggaggggagagaggctaaagattgtgaccccggctctccaaggaggtgtgacatcatcatcatctctggccggaaagaaaagtgtgaggctgccaaggaagctctggaggcattggttcctgtcaccattgaagtagaggtgccctttgaccttcaccgttacgttattgggcagaaaggaagtgggatccgcaagatgatggatgagtttgaggtgaacatacatgtcccggcacctgagctgcagtctgacatcatcgccatcacgggcctcgctgcaaatttggaccgggccaaggctggactgctggagcgtgtgaaggagctacaggccgagcaggaggaccgggctttaaggagttttaagctgagtgtcactgtagaccccaaataccatcccaagattatcgggagaaagggggcagtaattacccaaatccggttggagcatgacgtgaacatccagtttcctgataaggacgatgggaaccagccccaggaccaaattaccatcacagggtacgaaaagaacacagaagctgccagggatgctatactgagaattgtgggtgaacttgagcagatggtttctgaggacgtcccgctggaccaccgcgttcacgcccgcatcattggtgcccgcggcaaagccattcgcaaaatcatggacgaattcaaggtggacattcgcttcccacagagcggagccccagaccccaactgcgtcactgtgacggggctcccagagaatgtggaggaagccatcgaccacatcctcaatctggaggaggaatacctagctgacgtggtggacagtgaggcgctgcaggtatacatgaaacccccagcacacgaagaggccaaggcaccttccagaggctttgtggtgcgggacgcaccctggaccgccagcagcagtgagaaggctcctgacatgagcagctctgaggaatttcccagctttggggctcaggtggctcccaagaccctcccttggggccccaaacgataatgatcaaaaagaacagaaccctctccagcctgctgacccgaacccaaccacacaatggtttgtctcaatctgacccagcggctggaccctccgtaaattgttgagcgctcttccccttcccgaggtccgcagggagcctagcgcctggctgtgtgtgcggccgctcctccaggcctggccgtgcccgctcaggacctgctccactgtttaacaataaaccaaggtcatgagcattcgagctaagataacagactccagctcctggtccacccggcatgtcagtcagcactctggccttcatcacgagagctccgcagccgtggctaggattccacttcctgtgtcatgacctcaggaaataaacgtccttgactttataaaagccccgaattc

SEQ ID NO: 5 - DNA, 400 bp, Homo Sapiens
tttacttaaaaaaaagaagctccagaaaggaaactttgaagcaaaataaggactccctctccctccagaacataaagaatgaggtgtgttttgtttgagttggtggcaacatttaaactcttgtttatcccctaggaggtaaggagaagatattttccaattttcccaaacagggtgttatgaggtaaagttctgtgagagaaaggtgaggcccttaaatctgtcaaattattaactgatttttcttctacaggtggtgattttttgaatttcctatctttgtctttagcacccaattttagagaccaaatggttggtctaatcaaatagttattttgtgttatccagaatgacccctgcattccactctccagtaacttcctgaagcttttatcttgat

SEQ ID NO: 6 - DNA, 458 bp, Homo Sapiens
ttttttttttttttttttccaaggggagaatgaagccattttatttaggggaatgttaaaacaaagccatatacaatctgtaacaaatacaatacaattgtttgttccctagtcctgaataattacagtatatacaaaatctgtaaggcactggttcccccaaaagaacaaatgagtcttcttgtgaaacagacaacgaaacccctatattgccaacttttctccaaaaaatatggcattgtttttttgttttgttttacaagaggaatcacaattgctaaattaagtcacttctgatgccatttctttcatttccactgctatgtgtctgggttttctaaggcaatgtaactactgaacatgttcaagtttaaaaaactatacttctctcagtgccgttccacccacaaacaaagaagaatcagatcagaccaacaacataaaacttctaatgaatt

SEQ ID NO: 7 - DNA, 346 bp, Homo Sapiens
  misc_feature (306)..(306): n is a, c, g, or t
  misc_feature (319)..(319): n is a, c, g, or t
  misc_feature (326)..(326): n is a, c, g, or t
  misc_feature (333)..(333): n is a, c, g, or t
aaacatataagaaagcctttaattttgtcaccataaacattatactctgattgctcacttacagtataaaatattcaccccgctaaataaataagacgacattattgcaaacggcacttaaaccccccctgagagataagacctcccttagctcaggcagggggtgctcctgagtttctgtgtgagattccccaagcacagatatactctgggggctgagatggacaaaggcttgggaaaccgcactttggtgttctggtcctgcagtagctccaaacaggggttgtggaacctggttggggaaantgggggtaagggnaagtttnggggtangggaaaattttgg

SEQ ID NO: 8 - DNA, 432 bp, Homo Sapiens
gttgctcatagttattttttatttgaaagaaaataaactgattagagataaaggggatatcgtaggcaaggtaagtagttggatgaaatcacaggaagcatgaatagttgtgaccaattgcagaagactcaagctgattccatctcagggacacactctaccattcgggagatccccaacccatttgggtaaaactggaatgtctttacgagcagtggtagaagcagcggtggttgcagtggtaggagcagcagtggtcgcagtggttgcagcagcagtggtttcagcatcaggggcttcatcatcagcaggaccagtaagctggatacgtgtcagctggagcagctgttgtcggattctgggcagagaccagaaagatggaaactcccaagagtaccaggactgctaagaacttcatggtggtgacatgaa

SEQ ID NO: 9 - DNA, 446 bp, Homo Sapiens
ttccccatagtttactgctgtgcttaggttctgattgatgacacactcacgtaaggcacttatttacaaggtatggacttaaaacagaatcacagcatttctgcgaaagccctcaaactctccatctatgtttgctgctccaggacttctaaatagtcaggttcagcatgtaaattagctttaagttcaaaatactcattttttgtctgttccactaataccttccttggacgtgagtacattaatgtttccattaacttcagctcttcgtgggctccaggataatgtgcctccatatcaggctggagctgagcaatgtttttccttaggtattctgtgattcccagttgctgaagttccctttctttttctaaaatgtttctgtacaatgagctggcatcttggaaggataaaaattctgttgattggttcgtggttttgtattt

SEQ ID NO: 10 - DNA, 400 bp, Homo Sapiens
ccttgaataatcattttattaacaaatacaaacttgaaatgttggtgataaaatatatcaatattgaacaaaaatgtgtgtaaacagtaattctacaactgggaacatatctcagttttgttaattttggtgacgtcttcccaaccatgtctaatcttcagtatcttcttcctcaagcatggcaggaatagtatgcttttaaatatcaggacaacaattggaaggaaaacagctatcataaaagttggaggtgtataccatacaaatttgttttatatctatccacttattccaggcaaaaatcaatgccgtgtattgtgcccagtagaagggaaacaattcctagcttgctctgaatatagtgaaattctctccatgtcaaagagtcactcacagatgg

SEQ ID NO: 11 - DNA, 350 bp, Homo Sapiens
agacgtgctatgtccagggtgcttctccttgccagagctattatgttcaagctcctgcaagtggctcaacctcccagtactgtgtcactgacccatgctctgctccctgttccaccagctactgctgtctggctccccggaccttcggggtgagtcccctgagacgctggattcagcggccccagaactgcaacacaggatcatctggctgctgtgagaattcgggaagctctgggtgctgtggttctgggggctgtggctgcagctgtggatgtggcagctctgggtgctgctgtttgggaattatccccatgaagtcccgaagtcctgcgttgctgtgaccatgaaga

SEQ ID NO: 12 - DNA, 198285 bp, Homo Sapiens
gatcaggctctttctctctgtaaacctgctcccatggcattcttttctgcttcaattcagtccatccctgaccacccacccagccacccatgctggaaatctgagatatctttgactcctccaccttcccactcccacagctaatcagtagccaaaccctttagattctacttcctaattatcttgatattctatctcctctgcctcctctaattatgacttaattcaggctcttattatctgtcatttaaattattgctgtattgctacaggagtggtgtgtatatgtgcaactgttcatcttggtatgctatagactcttgcccagcagttttgcctcaattctttaaaagctccagttcattgtttgaaatatcaatcagaacattttttccaaaatgctaaaatgattgtcattccccagttttaatatctctatcatctgctaagtaaaagcaagctcctccttgtggcgtagcagggcccacgtgatctggcccttgcccgaatttgtagcttatcacaacatccttctaccccccattacctcctattatacaggaacacccaagcgaccttcacaacattcatatcaactagtacacagggtctccaaagaggacctctggatgcctgtgatctttgtacttctgcctaccctttgccctggcgtgtttttctcttccttcatgttctgctggccaaattgtttttccttcaagtcttaggagcctgcctgattatgttcctcctattccgcatcctcataaaattactgcgacttccaaaacacttggcacattcttatttgaatacattacattgttgtgtaattatcccttggccccctcccccagcactagactctaagctctttgaaggcagactatgcctattcatctttgtatttctagccctgggcccaacacccagaatttcttgtattttcaatatatgtctgccaaatgaattagagctaatgcctgaaggagaataagtttttttgagaaagaggaagagccaggagggaggagaaggcagggtccgaagagccctgggggtttacttggggaagatgcggttccccattgcagcattctgccaggaggtggcactgctctgaagagccagctggtcgcttacagactgaggctgacagcttgaaaccaaagagggaactccaccaggaagcaacattcctccactgggcttcccagcccagttacatgccatactctgccctggtcaaacagccaagtcttcaggaggttactggccccaggcgtctccccagtgactgatgatgttaaaccctacgcttctctgattggtttagacaaaatgacaagggcacctattggaaatgatctggcaaaacatgatctaaggccaccctctcggggagggagttggggaagctgggttggctgggttggtagctcctacctactgtgtggcaagaaggtatgggtcatgaacagaaccaaggagctgcgctgctacagatgttaccacttctgtggctgctaccccactcctgggccgtccctgaaggtaagatggtactcctatttacttccatcctgaacctagggagcccactcagctttgtgaggaaaagcgctgtgctttgtgagtggtgggaagtcttatgaggcagtggaaacaacaggggagtggggaaagacagctgctatgtgtggttggtaaacgatatcagtgatgctttgcatgttccatttaagacaatctcttgaagcggagattgttctctccattttacaaatgaagaaaatgagactcagagttatttgtgcaagttcacaccattggaaagtggtagagctgggatttgaacaaagtgaatgttattttcactcctccactcaagattctactctgctttctatcattaacttatcttgtgattcttgaaaagtgtcttagtttccttctctgtagaggatggggcagaatggaagaataatctggaagatccctcttcctccaaatgtctgtttttctgggtattgggttaaaggtttcctgctggctgagcgattcctgccaagagcttcaaagaagagggattattttatgcagttatggggtcacttctcccattgctgtctttgggaggcctggtaggttaaggaacagaagacattttgagagacgcttggtgccaatgaagtggctgaagaaatgtctggatacaggttttccaatttaccatttgtgtctggggatagtgggaggcagtcccatctatggcttggggaggctgtagccattcctcctctttcccttctaagagtgagaaacccatccatggccttctctagtcaatacagtggcctggtatgaattagacaaaggaatcccctttgggaggatacagccctatgccaggatgtatggcatggtgagcagaatgcaggctttcacttgcttctttggctaggtgtctttgtgcagcccccaaacacacaatgaacagtgactctgaatctgtcactttattttatatatatacatttttaaattttttatttgatttaatttattttttttgacacggcatctcgctctgtcacccaggctagagtgcagtgacgtgatctcggctccctgcaacccctgcctctggggttcaagagactctcctgcctcagcctcccaagtagctgggattacaggcgcatgccaccacacccagctgatttttgtatttttagtagagatggggtttcattatgtttgccaggctggtctcaaactcctgacctcaggtgatccacccgccttggcctcccaaagtgctgggattacaagcttgagccaccgcgcccggcctttatatatatattttttgagacgggctcattctgtcacctgggctggagtccagtggcacaatcatggctcactgcagccccaacttcctaggcacaagcaatcctcctgcctcagcctccagagtagctgagaccacaggtgtttgccaccacacctggctaagtttttgtattttttgtagagacggtctcgctgtgttgcccaggttggtcttgaactcctgggctcaagcaatctgcctgcctcagcctcccaaagtgctgggattacaggcatgagccaccatgcctggcctgaatctgtcactttagaaagtagaactctttacttttgccaactggcctttttataggcaggggaagcttggagagatgccataatttgttcttcaccccctttgggagggggagtctaaataacagacacaggaaagggtctcacctcagcccacgctccttaagcaggccttgcttgtttttgttgttttgttttgagacagagtctcactctgtcacccaggctggagtgcagtggcttaatcttagctcccggcaacctctgcctccctggttcaagcaattctcctccctcagcctcccgagtagctacaggcgcatgccaacatgcccagctacttttttgtatttttagtagagatggagtttcaccatgctggccaggctggtctcaaactcctgacctcatgatccacccaccttggcctcccaaagtgctgggattacaggcatgagccactgcgcctagccccaccttgctgttttttaagttggaggagaaggctcccacctccctgaacctcaccctgtgtcctttgcagctcctactccaatgtggccagatgacctgcaaaaccacacattcctgcacacagtgtactgccaggatgggagtcccagtgtgggactctctgaggcctacgacgaggaccagcttttcttcttcgacttttcccagaacactcgggtgcctcgcctgcccgaatttgctgactgggctcaggaacagggagatgctcctgccattttatttgacaaagagttctgcgagtggatgatccagcaaatagggccaaaacttgatgggaaaatcccggtgtccagaggtcaggagttttctggggagtgaagggaggagggctgcattaacctcattgatctgtacactgaataattccccttgataccagctccccatctcaaatactttctggttctcttcatcaccttaatttttccaccagccttggtctgcaccctgtgttcttttggtgggccgaagtacctagcatgtagtaggcattcagaactatgtattgaatgtgatgaattcaacaggtaccaactgatacctactgaatattaacacttgtgctactatgcccagcaagatggatgggaagagtggaaatatctgatgacgtgactatgtcttagtgagaagacagtgcatggttagacatcaatgtgagctctagacaggaagtgctgaaggaagtcatggtggaggggtccagagtagcctggatctggctctgcttctacgtctagctgcagtccttgcctggaagaagacctcccttcagagcccagctcctcgctcatctctgtctcccaaagcctgacccactgtgttcttctctgccctcccctccatatgccatggcccctccaaacacagagataccatctaaactagtctctttttccccctacacttcaatccccccaccagggtttcctatcgctgaagtgttcacgctgaagcccctggagtttggcaagcccaacactttggtctgttttgtcagtaatctcttcccacccatgctgacagtgaactggcagcatcattccgtccctgtggaaggatttgggcctacttttgtctcagctgtcgatggactcagcttccaggccttttcttacttaaacttcacaccagaaccttctgacattttctcctgcattgtgactcacgaaattgaccgctacacagcaattgcctattggggtgaggctttctccctggaattctggtccttttgggggcaaaaagggatagatccatgggaggaggcttctttctccactggtaccttgtttagtccattcctaccctaagcccatcccagtctcccatgtcatcccagacacccacgtcatttccctgggtgggaggctccctaactaggtccccaggctgagccactcatttcctccagtaccccggaacgcactgccctcagatctgctggagaatgtgctgtgtggcgtggcctttggcctgggtgtgctgggcatcatcgtgggcattgttctcatcatctacttccggaagccttgctcaggtggtatgtcatctggagggggcgggtgagcctgtgggagccagatacagtggtgcatgcgtgcatgtgtcaggattattttgtggcatggggggacatatagcgatcctcaggcccttgggtgtgggggcctgtatccagcaccatgggggcacatcttcccagttggggacccagttacacacacacagttatgggtcacaagaattgctttgagtgaaaaaaggaatcatggggtgctgtaggaagggtgcttggagatgatttgggaacaaggagagatcaacttctgcagggtgtggtgcaggcagggcgagcaaggcctttgtgggggaggaggaggaggagaaggaggaggaggatggatcccctgatgcctttcctccatccctgtctctcccccagactgattcttccagaccagagtttgatgccagcagcttcggccatccaaacagaggatgctcagatttctcacatcctgcccaggatctcctcttagggtagaagaagtctctgggacatccctggggtgtgtgtgtagatttcccacctggggactctgctgtccctgggcttgcatcccagggatcccagagtggcctgcctatcacaaccacatcccttccccccacaaggcaataaatctcatttctttatatcagtgtggcttctttcttaactcatggtatttgtttctggatatctcaacttgagtgggttgtcgtttcaaattcagcatgccttaacctgaacacagcttgacctcgttagggagggaaatagggaaaacccctaatttgccagctgagctcttattccctggtcttggcggtacatgatgtttttccatctatcggtttgtgcaaaatatgtgagaaacgaaggcagagttattttctaataatctgcttacaaaatggttaaggaagctgcttgtgtgttttgtgcgtgtgtgtgtgtgttgtgtattttactgtttgtgaaaatgtttatgtctcgtataggctgccctgaggaacatataactcccttcaaccctcaccgtaactgagaaacagaagctcagggatgggaagaataagctcccaagtgctataccaatcagttatgtcagttctgggaaaacagtatcatgaagcccctaacatgaagtgaaaacagcctggaagggcaaagaattcacatgtctttcctgacaatctgttccttggcctgagtgaactgtccaaggagaactgcacaggtgctgtcctgggaagataacgaaaggtggcagcacatgaccactggtggtaaattgctttgcatatgctttctttcttgcattccttagggtctgggagttgctttggatgacagggtggcaataaagttgagagggcaattatttggtgagggagtttctgttcttggcattgtactagagtctaatctaaaagaaaatattaaattctccctaagagaagttgcactgtctctgaaccatctcatttctaacagcatcatgtgtaccggttaagaagcatgggctctggaacctgactgctggggattcaatcgtaactgtcagcgtttagctgtgagcccttgggcaagttacttaacttgtgctttggtgtcattttctgtaaaaggatgatgataacaatggtgtcccccttaccactctacacccaccatgttgccaacatttgaaagtcaaataagtattagcgaggataaaggaaaatgtgaactgtaatatcttggtctgttggtgggaatgtaaactgtttatgatgcccgaattacagaaattatgaactagttgagtgaaaaagttaatataggaaataaggcagcatatcctcatgctgtgaagcttaaataagttaatacctacagaatgcttaaaatagtgtttggcacatagaaaatgtgctgaataaccctaacccttatcattattggtcttgatcttcagaggagaacttagttgcctcgtagacttctttctcttttctgaaaatatacctcaatactagcttcaagtattgtattttctccattttagatgtttttctttttattctcatgttagtaattctagatgtggtgctttctagttcttcctaatttctctgtctctctgttttccaacttatctagatatttcctgtcaggcaagacttaaaagtgctttattatgctgtgtgactttagacaagtcacttcccctctctgggcctcaaagtcttcatctgtaaaatgatgggcttagattagatgctctctgatgaaaccttctatgatactgttacttaagtactctagaagcactcaggtatcctctctagtctggtgccccttttctaatatactatattacgcactattcccagcaggaatgctattcttgtttaaatcttttttcctcactcttccttgaggtattatatctgattttggtttagggcatttgcccaggctctttcctctcatacgggagctttctctattctgctcatcttgttcctgtcttaacccactccataggtccaactccagttcaacttattccatgaacctgcccctaatttctctttattgaaatcttccaagacttaaagcactcaacctaaggattgggatatgccgctttatttcctatgttaattttttcgcccaactagtttataatttctataattcagggatcataaacagtttacactcccatcaacaaagcaagatagttcacatttccctttatgctcactaatgcttgtaattatttgactttcaaatgttggcaacatggtgggtgtagagtggtattttgttgttttaatttgcttttctctcattactaatcagtatcatattgtttgattattttggctttttaatatgtgttactattaagaagaacaagtctccattccttcaccaccttcccaaaaaatttattttccttttctttatcaaaatatcctaaaatactcttggactttatttccttgtacattcataatcagttgttaaattctcctgaaacctactgttactttaatttggggtagcatttaggttagagatgtggggagaggttgtcattatgttagcatggcctatccatgaatatggtatatctctacacctctcaggtctttgtgcacttcaataaagttttcttttttcttaaaattcttatatttgatatgttaattcataaatatgctatggtttttattgttattataaatagtaggcaattttcagttattttccaattgattattggcaatacaggatttaaagtaataaatcctgagttcaagtaatggttttattacttagtatctgggtaaatctgggcaaccacttaacctccctctgcctccattttctcgtgggtaagatgaagatagcattcttcaatagttgtggtggcaaaaaataaaattaaaaaaggaaaaatagttgtggcaaatcagatagactatccctagtagttcaaataatttgactgtaggttggaaggatggtgaactgactacagaaactataatccaaaggtcagggtctagagcagtgaatcctgacagggtaggagggtgtgtgtgtgggcggaggtgaggtaaggggtagatggcaggggtggggtggggattggacagattgggcaagtaatataatcttggcaggatgtaggtgtgtgtagttttgaaaagacactgaagtcacgaatgtggtcttatgctatgaggcgtgattaactggttgagcaattttgtgtttataaaatggagacttcagttaaaaccgtctgccccaagaacctgcgaactgacatggagcaactttaggaagtgcctagaagagatttattattatggccatactctcagaaaaaaacaagaaatcacatttgtgacttcctccaacgtgcagtgccagtgacgttattgtagcttgtctttgttttagctaacccaggctctcgtaggacacctcctccctgatggcacctcacagcattgtcaagcttgtggagctatacaccagacctacaatgccaactgccttcctcctctccaacacaaatccagcccagtattcaaggctcattccaggccctctcgactgagagtactccctgtctaccatgtccatggtgatttctctcttctcttttaagaccactggccttattgcttacttactttaatataaactatttaaagtgtttgttctcactccccaattgacgtacaagcaaagcgatatgggggcagaatccatatcttctcactctgtattttcccagtaatgctttgcacacaaaccctgggactagtttactgcaggcatgtggtggtcaggctaagggcagaggcaatgggaaaggagaggactcactctttgggtggttgtgtagaggcaataaaagaaaggcaacatgtgggaacctggttggggctccatacctcttcggtcccggtgctatatcaataattaacaaataagtaacaatggacagagcaactgaaatgttattttgaattggctagaggtggaaagacagagctatatctgtaaaaatggaagggttgggaggaggagaggaaggaaaacactgctgagcacaggtgtctgggttttctgtccttctttattctaaaaagctccctcagtgtttgaattaatagagaagtgaaatcctctcctaccatttcctgttgtggcctcacagaaggtttcacatctcctttgactgccggagcagagatctagacataagagggaactacattcagccccactgttactggctagggccatgttcagtgctggcacaggaccacacagccagtgctcccttgccagggctaggctttgtagacattgaaaaggatcccaggacttggttcctataaggttaggctaacagcttacctgggcaggatggggaggaatgtgagggggaaatgtattgggggggtgtgggggaaaattcagttttgaaacttgtcaaaagagaaagtggaagggacggtggttctcagagcagaaggaactctgaggacaggaaagataagacttgggtgaattgggttatggattgtgactcttctctttctctctttctcagcggaggcctcactaactccctttatttgagccatcccagttccaagatgtagtgagtgtgtgggcatgctcaagagagtgtgtatgtgtgtgtgtgtgtacacacgtgcatgtgtaacagctgtataagaagaggagttacagcctttagaccttgggtgtgaatctttggacctgttttccaacctgggaaatgaggacaattaacaagttttttttttttttttttttttttgagacagtctcattctgtcacccaggctggagtgcagtggcacgatctcggctcactgcaacctccacctcccaggttcaatcgattctcctgcctcagcctccagagtagctgggattacaggcacgcgccaccacacccagctaatttttgtattttttgtagagacggggtttcaccatgtttgccaggctggtctcaaactcctgacctcaggtgatatgccttcctcagcctcccaaagtgctgggattacaagcgtgagccaccatgcccggccaacaagtcttttaagatgagatgagatattatagaaaggacctacctagcactgtatctgtagaagctctacagattatgcactccccaccccatattctgcccattccaacacacttgacagttcgttagcagagttagagtatataagcaaggtgagtgggggcagtggctgggagctatggcagagcttcagttaatctcaattagttacacaacgaatctttcgtttttggtaataatctttgtatgcattttttatccccattttcttcataggtgttagattttcctgagatcagggactttgagggagggcaggtaagtgtggtgtcaaggggccccttccacaatcctgttttgtttagctcactatttaataaaatccaagagttctcagaaactaagatgtgaagaggcagccctgaaacctactggggagcagaaggaagccaatttagagtttcaagttagtgatggaaaatccatcaactgtatagttcacaatgggatagaagaatgaattgccgtttaaaatctgctttttcaggccaggcacgatggctcatgcctgtaatcctagcactttaggaggctgaggtgggtggatcacttgaggtcaggagttcaagaacagcctggccaacatgatgaaaccctgtctctaccaaaaaaaaaaaaaagacaaaaactaaccaggagtggtggcacatgactgtaaccccagctactcaagtggctgaggcatgagagtcatttgaacccaggaggcgaagattgcagtgagccgagattatcccactgtactccagcctaggcgacagagtgagactttcaaaaaaaaaacctgtgaaaaaaataaatacgcaaatacataaaatctgccttttcaagacacacacgtgaccaagaagcatatgaaacaatgttcaacattactaatgattagaaaaatgcaaatcaaaatcataatgagataccgtctcacaccagtcagaatggctattattaaaaagtcaaaaaataacaaatgttggagaggttgcagagaaaacggaaggcttatacactgctggtgggaacataaattagttcagccattgaggaaagcagtttggcaatttctcaagaaccttaaaacagagctaccattcgtcccaggaatcccattattaggcatatacccaaaggagtatacattgttctaccataaggacatatgcacatgaatgctcactgcagcagtattcataatagcaaagacatggaatcagcctaaatgcccaccaacagtagactgtataaagaaaatgtggtacatatacaccatggaatactccacagctagaaaggtcgtgctcacgtcttttgcagcatcatggagctgggggctgttatcctaggcaaacctacacaggagcaggaaatgaatactgcatgtctcactttatagtggagctaacatgagacacatggacacaaaaaggaataatagacactgggccctacttgagggtggaggatgggaggagaagaggatcaaaacactacctatcagatactatacttattacctgggtgatgaaataaatttttacgccaaatcccgatgacacacaatttacctatataacaaacctgcatgtgtacccttgaacctaaaacaaaggttaaaataatttaaaataaataaaaaataaaatcttacttggtattctcaaaaaataaaaaacaaaatctgtcttttcaggggaagaaaagtaggaaagctttatctcattttcctagtggcttcataatgcagggacctgcccccagggaacagggtatagtaggggaaacacacaggggtgtttagagtttggcgaaaggcaggtgagctctgggcactgacccgtcaccagctatttttcaaggagtctgagaggtgttaacctgcggtctaccccgtgagattgctcagagtgtaggaggatatggtttactagctccggaaagcagctattataactgaggaggaaatgaagcttgactggctagaacagaagcaacaatggaggcccatggagggattttccaggcccctattcctgatctccatggtggcgctgcttcccttattctgcagtcttgctttgagaccagacaattctgtactctgtctgtgccttcttccttctcagcagccctgcctctgccacctgccccagaagggctctgggtcctctcatctcaggacagacaagggtttttgtaattatcttcttgggtaacctccctgtaaggaataggagaggttatctggtcctggtcttttgggagagcattgagaagaaaaagttaaaccagtgggcagcccaggctgcatacatcctgggaatattgcgattattctctccagtaatctacggaaatctactggttgttctgcagaaaaagaattaagagagacaaggagacctgttgtctaagactaaggcaggatgacgtttacctagtaactgatgatgctaggctgaggcactcagtgatttgtctctacatttgtccctgcctacctagccaatctgtccctgtttgggacactggactcccgtgagctggaaggaacagatttaatatctaggggctgggtatccccacatcactcatttggggggtcaagggacccgggcaatatagtattctgctcagtgtctggagatcatctacccaggctggggcttctgggacaggcgaggacccacggaccctggaagagctggtccaggggactgaactcccggcatctttacagagcagagcatgatcacattcctgccgctgctgctggggctcagcctgggctgcacaggagcaggtaaggacacttcttctggggactctcccttcccctgctcctgtttcagggtaagggtgttccgttttgtaattgcatttgacaccccagatagtttgtctccctggtatacattcctatagcactttgtactttgtagcaattttaatgtaattaatctgtataattatctgtgcagtgtatattccctgctggaatataggcaaggacaatgttcatcttatttattgctgcctcctcagctcctagcacagtgccttgcatgcagcaagtgcttcataaatatgtgcgaagtgaatatttaatatttccagcacaatacaaggctgactctttctcttgaccctttttctctctcaataatttgccttactgaaggtctgtgttctgggcaaattgtcatgtttaaacatgcaaataatctcggggggctactcctatccctgtgcttagtcttgcataaagaggagactggatctaaaaacttatctactacttctactgactccctcaaatcagactttcagaaacttcagtgtatgagcttggtcagtagatgttccctgagcaggaaatctgtgccagactagctggatgtcaccaaggcttaggttctgagctgaatataggaaaaatcaactttttttcttctatatgctcacactcaacacttctttgaccaactgtgtgaggttttttttttttttttactcataccaaccaattctcctatattagctggatatcctataattcaattccattgtgacattaactagagttaacatagacaccaaaggttaaagactcagtcccataagactgcctccatttcagacaccaatcacaagtagtaggttcccaaattacccacatcttctgtccaacttgcctacaaatcagaggttcccatgaccccctccttggggttggtaatttgctaaagtggcttatggaactcaggaaaagtttacttattattgtagattttttacaaaggatattttaattgataataataattataaatattcatggggtggataatgatgttttagtacatgtaatgtacagtgatcagatcagatcatcatctcatttatcatttctttgtgttggaaacattccatatccttcttctagcgatttgaaatgatataaagtattattgttaatgacagtcatcccacagtggtatagaacactagatcataattttgcatcctttaacaaaggatattttaaagcatacaaaggaacatccagatgaagagataccagatctggaagggtcccaatcacaggagctctgtccccacagaattggggtacttcacctcctggcatgtggatgtgtttaccaactgagaagttctctgaactccatagttccgggatttttatggaggcttcatcatgtaggcatgactgattattaactcaatctccagccccttccccttcagggagtatgggggatgggactaaaagttccagacttctaatcatgacttggtctttctggtgaccagcccctcctgcaggagcccaccaagagtacctcattagaacaaaagacactcctgttatctaggaaattctaagcgattaggcactctatgtcaggaaccagggtcaaagacaaagctctgtgcagagctcctaaatatacgtctgtatgttttatatatttattatttgtgtatatttattatttatatatttatttatttattgccaggccagtagaagacattgacctgttctcccttccctggctcctctaggtggcttcgtggcccatgtggaaagcacctgtctgttggatgatgctgggactccaaaggatttcacatactgcatctccttcaacaaggatctgctgacctgctgggatccagaggagaataagatggccccttgcgaatttggggtgctgaatagcttggcgaatgtcctctcacagcacctcaaccaaaaagacaccctgatgcagcgcttgcgcaatgggcttcagaattgtgccacacacacccagcccttctggggatcactgaccaacaggacacgtgaggagagaggggtgcagaggggctaccaggaagtgcagttaggagggcaggccagggaggatcccacagtggcccaggggtttgagatttgagcagcaaataagagaaaatgtgtggatctgaaatgtagaaagacggaggattgaacctcaaggggaacaaggtggctgacgtgagtggaacaggagtaaagaaggggaggtgaggcttgaaccgcgaggtgccatgtggggagcttatgcagaggctggggcatctcaggatgcatacccaagatgttcttgccttgttatcccagattttgatgttccagatctgatgtgggcccaggcatgggaatatttggaatcccaggggattctgacacatgctttttctcacccttaaactcttgcattgacaatggcttgaagtttgtgaaagtaaacttgaagatctccacagtacagaacagtgtgtctcaagggtggtttctgaaccacctttctcagaattgcctggaggaggtgcttgttaaagatgcaagccccttagtaccactccagatctgttgaaagaaagtatctggggatacagcctaggaaatctgcattttaacataattccttggatttttatttaagattgtgtttgaaaaatgtcaagatagaggcaagcaagaggatcacctaggagagtaaattagtaaaagatggcagtattagcaatctctttagtttgactacattcattccaaatttaagagtgagtcctaagttaggcttgtttccttgaactatgtgaggagaaaaagctttaactagcaaaagaacgtattaaacaagatttggagaaaaattccttttccaccttaaaaaaacccaatgtacaactctggattactcttagcttccttatttcaaatactttccagtttatgtacttgaaataaatacaacaacttctagaacagcttgcagttcagatctggcttttactaattgtaatcaaacataattctggaggaggaaagaaagaaaggggcaatgaaggaatgggagagaagaaagagtaatgcaggaatacattctaacggttccccttcaaggggcagcatggcagagggggctggggtggaaagtgggttgcaaaatctacgaagagttgcgatagggaagaaaccaggttgaggaagcagccagaatgtcaccctccttcctaaacatgtttttttctcctatgcagggccaccatctgtgcaagtagccaaaaccactccttttaacacgagggagcctgtgatgctggcctgctatgtgtggggcttctatccagcagaagtgactatcacgtggaggaagaacgggaagcttgtcatgcctcacagcagtgcgcacaagactgcccagcccaatggagactggacataccagaccctctcccatttagccttaaccccctcttacggggacacttacacctgtgtggtagagcacattggggctcctgagcccatccttcgggactggagtaagtgtatggcagatggatggaattagggtcaaagcagagaaaatgagatgtggatcgatacatggtacatggtagacagcgaagtgctgaaaatggggactgagtctggaggaacttacggggggcttaggaccagaatggggaaatgggataaagaaatggaaatatttaggttggtgcaaaagtaattgcagtttttgccattactttcagtggcaaaaaccgcaattacttttgcaccagtttaatatttagtctgtgctattgctgctctggtggtgtggttgatgttgctgcgtctatgtttgagggtgagaggggagcgtgcttgctttgaaatgaggatgtaaatttggcaatcatattttcagaaccccaaattgtaatacactattctagcctccttagatttcaactattctggtgccagaagcagatgggagctgaaggaatgatgaaggttgaagaaggggggcttttcttggtgtggggcagtactgcatttggcctgctctaccaagcatacgggagtagtaaagccacggctggcagaccatttggcatgcatgctcaggggccagtggataaagaattacttacagttcaaacactgtttgaactcagtgtcgggagtagttaaaggtatcgtgagaagttgcacacagctttggggactcttggaaaagaaagaggaagaaatgaggaagaggaagggtgtctacaaagggccagagaacaggatctcagatcagctgctgtaaccaggtttccccttgtgggaagtgttgtttcttgctgggcagttgggaagggaatggagaacagagaagagagtggaaatcacatgctcacttgaactttcctggggaacgtctcctcacagcgtgcacaagagcctccctttagaaatggagtgttcattttatcatgggaaaagaatctgagtgggacatgattcagaacaggaccggcccaaggaagtgcaggggctgtggagtgggatggagacaagctctgaaaggacacatgggagatctagatgtagaaggtacacaagtagtaggataactcacaggatggatccactggaggttaagacatgtggtaagacagtgtaataggaagctgctcagttggagaaagtaaggaagcaaacattgttaccgtgggggcaatggagaggacagtgaggagccctttatcctgataagggtggctttgaggtaaaggaaggaaagaggatgccttgagaggccccactgtattagagaggacctggaagccaggatgctaattctggggagatggattccccaggcttactctaggagtagaggtccatgggacgagggtttgatttgagaaagatcattttcttgggagtgggtggtgtgagctagacccttggagctgggataaaggaccttttaacccactgagaggtggctgcaataaatggaattgccctgggggtgagcaacagaaactgggtcaagtaagtttctattttttgcagcacctgggctgtcccccatgcagaccctgaaggtttctgtgtctgcagtgactctgggcctgggcctcatcatcttctctcttggtgtgatcagctggcggagagctggccactctagtgagtgactcgctgaactcccatccccactcttggtcccactctctgcttactttctgtttgtgattaactctctccttcctactgcatttgctatgaatactgctagatattttcatccacaaagactggtataatcaagtatcttcctctcttaggttacactcctcttcctgggtccaattattcagaaggtaacatctctgttggtctgtttccctacttgccctttggtaggggtgcgggttagaggggtcagtgttgggttcaactaatcttgattattatatgggtgagcttccatgaggatctaggcaagggcatgatttaagctgccattgctaggattaagagcaggaaggagcatcctcctcttctaccaagtgggatgtctgtggagaggaggctgaaggtgcttcctttgtattagttgttggtgccctggagttttcagtatcactgtattaaggcatgggatggttacagtgacaaacgatgggggcaagttgggttgaagcctcattatctcccttttatttattctgtaggatggcacatttcctagaggcagaatcctacaacttccactccaagtgagaaggagattcaaactcaatgatgctaccatgcctctccaacatcttcaaccccctgacattatcttggatcctatggtttctccatccaattctttgaatttcccagtctcccctatgtaaaacttagcaacttgggggacctcattcctgggactatgctgtaaccaaattattgtccaaggctatatttctgggatgaatataatctgaggaagggagttaaagaccctcctggggctctcagtgtgccatagaggacagcaactggtgattgtttcagagaaataaactttggtggaaatattgtttttccatgtcttcttcctggggccctggggaaggaatatgggcaaagcagggactgaggttaattctcttctgcttgagtaggggagaaatcaatgccttcttccattttcccacttagacatgacagaatttggggccgttttctgatttataattcataaggagaaattcaactgtggtgggttggagtcacagagtatgggcaaggaagggaattaacagcttactcacctcatacaggatcttatgaggattaaatgagttcatacttgtaaatggctaagaacaccgccaggcacatagccagcctgcaatagtgacgttagctatattcgattattcaactttctggccaggcattgtaccaggtgctttgatcctcatcacaaccgtaaggcagacccctcatacccctcaggattcaggggacagagcttaactccagattgagttctagacagttatttcttccataccctgaatgcagaagggaacatagcttgagtgattattatgtcttaggcactggtctcagacctttatatttgtagctcattctcttctcacaataaccacacaagggacagattgtttccctctatgttacagacaaaagatgtgaggctcagagacatttaagtgacttgtccaaggtcaaagaacagatttctgtaggatgtttgtctacctgagctggaagtagcagattactttattctgaagaccctcatgctggtgagcacacatctcttcagagccaccgttccattcccttctaccccaagaccaaggagagccctttgggggaatggactccaccctaaggaagagaggatgctggctggtggtttgttgtcccacgaagggcgacacctgctggacacagaaacctagggtgtggaattgtttttggaattagagctagatactagaatatgggtaagaaaaagaaaccaagaaatgagttgatttggaacacctccataatttcttcagaagcatccttggaattagagcatctcttctggaaggggttaacagaagaagtcagtggaaggaacttaatctctacattttaccatttttatgtttcattttcattttttctattcactgtttttgtttttatttttgtttgtttgacaaagcaaattccttttgaaattctagtttagtctaggaatggggggctttgggccttgtctatatctgggcagttttatttattatttttattttatttatttattttttttcgagacagagttttgctcttgttgcccaggctggagtgcaatggcgtgatctcggcttattgcaacttctgcctcccatgttcaagcgattctcctgcctcagcctcccaagtagctgagattacaggcgtgcaccaccatgcctggctaattttgtattttcttagtagggatggggtttcaccatgttggtcaggctggtctcgatctcctgacctcaagtgatccacctgcctcagcctcccaaagtgctgggattacaggcgtgagccaccgcactaggcctatctggacagttttaaaggagaagctgcagatctgaagggtctagttctagtcacagcagtgggaatcaaagtggcaggatcccagagaaaggaagtagagagttagctaatgggacggcttccagttccttttctagagatttccagtgcaggcttttctctgccctaactttgtaggttttttgttttataggaaaggctgtccccttccaggtaaggaatagggaaaagtatatgtaggtctgctaggatccagaaagtcagaatactataggtagaaaggggagttcttacacaggggaatgagtggtacttgaaaggaaggtggaagaagggtgatggtgcaccaattgtaggaggatgaggagaagagaatggatgctgcatgaggagaatggaatgtaaacataatggattgccaaaaaaggagtgcgtgtgtgtgtgtgtgtgtgtgtgcacttgagcacatgtgagagaaagagaggaaaaaaagagaaggagtggaagagagtaagagagagggagcaaaagggtgagaggagagaagtggagtgggagaaagaaggagagggacatagagagagggagggaggggagcgggggaagagagagagagctggactttcgggttatacataatccaagctgcacaaagaattgttttcgcccttcaatgtcttgttgttttaaaagctgaacttggagctagaattggttttaaaggtcatctagtccacctcccctcccatgaaagaactgggcctgtgttaacaagggcacacacagtgcagggagttccttcaacacttggggcagataacaatattttagagaaacgcgttgaccccacatttgagcttcttcttttgaccattaaagacaatgagaataaatctcaaatacaccacgggaggtggtatccttggcattttttttttccctgagggagagcatgttcctaggttccaggttctctttgcctccctacccacgaacacatgcatgtgaaagaaacagacaagattgacatttaatcccaatgtctatttatgaaaattatctttaggccattttctcaagtttttctctttccaaagtaaaattgggcaaatcagatgaaaaacgagggtggagttcaaccccatcctcaaatccttttttttttttggcttgagtgtctgtcattcccaagagccctccaactgccttgaagcaaggcatgggggatttctccgtggtgcttcctgccactacttggccagaccagtctccaggggtttcagagagtggagaggccccaaacctatagagactactcccagatggggggctccttgtttctccagacccttcctcttccatttcatatgaggcttccaagaggcccctggccgtgctggtctggggcagggaataaagaaatggcttttattgtatcagagtctcaacagaaaacagatggcatactcgaaataggacatttcaaggaaagtttatttattagcaaagtatttacaaagaactgggtggaggatagctgttactaccccaaggtccaaagaggccggggacagaaggggttatcaggactcagaaggacagcaagccctgtacagtcaccaccttgccaagggcagtgcccttcagtcaagggacacaacagcttaaggtgaccttgtagggaggaagccaagggattagaaacactgacctcactcccctcttccctctgctcttaggctgatgctggaagcaagaagaagccagggagcatgggagccattcaatgtcatgcaggtcagcacctgaggcagaccccaggtgcagaagtattgagagtgggtccagaaggacagatggaggacaggaagtacattcacaacaagaaggaaaaacgtcaatgttgtggggtggagagagaggtgcaaaatctgggcttcttttggccttggacaatgacaagcgcatagtagcaacagaaactaagtttgtagtttcctactggggagtttgggaggacactcacttctagttctgtcttccccacttgaattttgattgtggttatactgaatttatagaaatttggggttaactgacttgtttttattactaaatcataccatgcaaaaacaggatgttttctcatttattgaaatcattttgtttgctctttattatggtttttaaactttactttttcatagtagtcctgagtatgctcagttaattcttaggcatgttgtagcttttgctgctattgtgattggtatcttattgcaattctacttttgaatcagtaatttctgatgtagaagaatgtatctaatttaaaaaattgtggttaaaaaaataacatttaccgtcttaaccactttgaagtgtacagctcagcagtgttaagtatattcacatttttgtgcaaccaatctccagaactccttttcaccttgcaaaaccagaactctacacccattaaacaacaactcctcatttctctcttcctctagcccctggctactatcactctacattctgtttctatgaatctgactacttcagataccctgtacaagtgcaatcatggagtttttgtcttttggcgattggcttatttcacttagcttaatgtccttaaaattcatacttgttgcagcatgtaagagtgctttcttcctttttaggctgaataataagctactgtatgtatatgccatattttgtttgcccattcatctgtctatggtcatctttgttgcttccacctcttggctatcgagaatagtgctgctatgaatatgggggaaaatatctgcttaagtccctgctttcaattcttttgcatttatacccagaagtggactcttgggtcatatagtagttttactactgattttttgaggaactgccgtactgtttcccatagcagttacacattttacaatcccacgaacattgcatataaaggttctaatgtctctacatcctcaccaacacttatttcttccctccctctctcccttccttccttccttccttctttcctttcctccttcatttgctccctccttcattccctcccttctttcctttttcctttcatttttatagtagccatgctaatgagaattagatgatgctatggttttaatttgcacttctctaataataagtaatgctgagcatcttttcatatgtgtgtttgccacttgtatatcattctcgaggaaaaattgtctgtttgaaagttttgtttgccccctttttaactgtttgtataaacaattattgttgggttttatgagttctttacatattctgaatattaaccctttattggatatatgatattcaaatactgatatatgattttcaaatattagaaattaataatttttgtaagttgatcttatatgggacaaccttgctcgatcctcttattggttttagtggggtttttgttgttgttgttgtcattgttgttattgatattctctctgtctctctctttttccaggtagataatagtatcatctgcgagcattgttttgtgttttccctcttaatccttagtgttttatttttcatgttgcttgactaggatcttcaatgctgtgtcaaacagtagggtgataatgagcattactcttaaaggaaataaacctaaatattctcattaagtataattttgctgtatattgtagattcacatgcagtggtaagaaataataaaaacaatcctgtgtatcctttacccagtttcccttgatggtaacattttgcaaaactatggtacaatatcacaattaggatacatggatacagccacaatacagaacacttctatgatcacaaggattcttcaccttgcccttttctagacacacccacttccctaccatcccataccctccttaatgtctagcaatcactaatctcttatccatttctatgactttgtcacttcaagacaaatttttttttgtcattttaaaacaaatgattaataaatggaaacatatagtatatacacttttgggattgacttttttttctctcaatgtatttctctggagatcatacaaggttgttgcatatatcaataatttattattgcctagttgtattatatggtatgggtatagcacagttagtttagccatctgtccatcacatctgggttgtttccagatttggctgatatgaatataagtttttgtgtggacataagtcttaatgtctctggagcaaatgcccaggagtgtacctgctgaattgtatggtggttgcatttttagttttttaaataaactgtcaaagtgttttccagagtggttgcaccagcaatgtgcgagtgattgttttactgcatcctcacaggcatttggtattgtcactattttttttattttttttgagatggagtcttgcactgttgcccaggctggagtgcagtggtgcgatcttggctcactgcaagctccacctcccgggttcgcgccattctcctgcctcagcctcccaagtagctgggactataggcgcccgccaccacgcccggctaattttttgtatttttagtagagatggggtttcaccatgttagccaggatggtctcaatctcctgtcctcatgatccgcctgcctcagcctcccaaagttctgggattacaggcatgagccactgcgcctggcttattgtcactattttttatttcagccattctaatatgtgtgtagtgagatcttattgtggttttaatttgcgtttccttaatggctaatgatatcgaacatcttttcatgtgcttatttgccatctgtatatccttttaatgaaatgtctcttcatgaatttttcccattttctaattaatttttttcaaactgttgattttttttctttttttttctgagatggagtcttactctgtcactcaggctagagtgcagtggcatgacctcggctcaccccaacctctacctcctgggattacaggcgtgtgccacaacgcccagctaatttttagtatttttagtagagacagagtttcaccatgttggctaggctggtctcaaactcctgacctcaagtcatccactcgcctcagcctcccaaagtgctgggattacaggcatgagccagggggcctggcctgagttttgataagttgttatatattctagatactagtccttttttggatacatgatttgcaaatattttcttccattatgtagcttgccttttcattcctttacaagtctttcacagagcaacagtttttagttttaatcaggtctaatatatccattttttcattttacagatcatgtttttggtgtcaaatctaagaacttgttgcccagatctagattcagaagattttcccctatcttattctaaaagttttatagttttacattttgcatagaagtttgtaatccatattgagtcaatttttgcagaaggtatgagtcttagattaaactgctgctcctccttctcttcctccttgttgtctttctctcctcctatggcccttgaatgttcaattgttccagcaccatttatgtttttccgatgtctgcagggtgtgtagggatattccctgtggacatttctatattctttctttcttctttgtcagtgtagtctgctagaggttcatcagttgactgatcttttcaaagaagcaactttttgtgtctcactctgtggcccaggctggagtgcagtggtgcaatctcacctcactacaacctccgcctcctgggctcaagtgattctcctgcctcaaccttccaggtagctgggactacaagcgcctgccaccacatttggctaattttttgtaattttagtagaagcagagattcaccatgttgggcaggctggtctctaactcctgagctcaagtgatccacctgccttggcctcccaaactattgggattacaggcgtgagccacagtgctcggccttcctttcttctttggatgtattttgatcttctttttctgggctcttgagatgagagtttgaattattaatttgtgtacttttttttttttttaaagagacaaggtctccttatgttgcccaggctggcctcgaactactgggctcaagtgatcctttcctgcctcagcctcccaagtagcacccagtttttcttctttttaatgtatgcatttaatgctataaatttccctttcagcactggtttagctgtgtcctataattttttttattattttgaaaatatttcgtgggttcatggtaggtgtatatgtttatggggtacatgagatgttttgatacacgcctggaatgtgaaataaccaaatcatggagaatggggtagccattccctcaagcatttatcctttgagttacaaacaattcaattacattctttaagtaacttaaaaatatacaattaagttatttttgactatagtcactctattgtgctatcaaatagtaggtcatattcattctttctactttttttgtacccattaaccatccccacctccccgctcagctatccactacttttctcaggctctggtaaccatccttctactcactatgtccattagttcaattgttttgatttttagatcccacaaataaatgagaacatgtcatgtttgtctttctgtacctggcttatttcacttaacataatgatctccagttccatctatgttgttgcaaataactggatatcattcttttttctagctaaatagtactccattgtatgtatgtaccacattttctttatccattcatctgtcgatagacacttaggttgctccgaagtcttagctattgtaaacaatgctgcaattaacataggagtgcagatatctctttgaaatactaattttctttctttcgggtatattcccagcagtgggattgctggatcatatggtagctcaattttaatttttttggaggaacttccaagctgttctccatggtggttgtactaatttatattcctgccaacagtgtacaaagccttctccacatactcaccagtacttgttattgcctgtcttttggatacaagccatttttttttgagatggagtcttactcagttgcccaggctggagtgcagtggcccaatctctgctcactgcaacctccatctcccaggttcaagcgattcttctgcctcagcctcccaagtagttgggactacaggcatggcccaccatgcccagctaatttttgtatttttagtagagacagggtttcaccatattggccaggctggtcttgaactcctgacctcaggtgatctgcccgcctcggcctccctcagtgctgggattacaggtgtgagccaccgtgtccagcctgcatacaagctattttaactgaagtgagataatatctcattgaacttctgatttgcatttctctgatgattcataatgttgagcacctttcataagcctgattgccatttgtatgtcttcttttgagaaatgtctattcagatcagctcattttttgtttggactattgaactcttttttcctatagagttgtctgaactccttatatattctagttattaatcctttgttagaggggtagtttgcaaatatcttctctcattctgtgggttgtctctcctagaaatttttgatatgttgtattcttattttctttcaattcagtgtatttttaaatttcctttgagatttattttttgactcgtagagtatttaaaagttttcgcttagtttcttgactttcctctgtcatctttctgttatttatttctagtttgattccaatgtagtcagagaacacattctgtataatttatattcttttaaatttatcaatatttgttttatggccctggatatagtccaacttggtatatgttgcatggacacttcaaaagaatgtatattctgtgcggccaacaagcatgtgaaaaaaatgctcagtataactaatcattagggaaatgcaaatcaaaacaatgatgagacaccatctcaccccagtcagaatggctattgttaaaaagtcaaaaacaacaggtgctaacaaggttgtggagaaaaaggaacacttgtacactattgggggtaatgtaaattagttcaggcactgtggaaagcagtctggagatttcccaaagaagcttaaagcaaaattcccatacaacccagcaattccattgttgggtatatacctaaaagaatataaattgttctgtcataaagacacatgcacatgcatgttcatcacactgctattcacgttagcaaagacatggaatgaacctagatttctttatccagtgctcatcaacagtgcactggataaagaagatgtggtacatatacaccatgaaatactacacagctataaaaaatgggatcatggcctttgcagcaacatagatggaactggaggccataatcctaaacaaattaccgcaggagcaaaaaaccagctaattgcatacacatggacacaaatagggaaaaatagacactggggcctattgagggtggagggtgggaggacagtgatgattgaaaaagcacctatcgggtattatgctgatgatttttcctctgctgtctttccgttattgatttctaatttgattccattgtagtcagagaaaagtttgtataatttaaattcctttaaaattatctgtacaccaaacccttgtgacacgcaatttacccatgtaacaaacctgcatatgtaccccttgcacctagtaaaaccggaaaagaaaaacaacaaaaaagagccaatgtgtattctgctattgatgggtggagtgtcctgtaaatgtggatttgatcctgttggttgatggtgttattgagctcttctacatctttgctgattttctttctagtttttatttttttatttttattttttttgagacagagtcttgctctgtcccccaggctgctggagtgcagtggcaggatctcagctcactgaaagctccgtccccaggttcacgccattctcctgcctcagcctcccgagtatctgggactacaggcgcccgccaccacgcccagctaattttttgtatttttagtagagtcggggtttcaccgtgttagccaggatggtctcgatctcctgacctcgtgatccaccccctcggcctcccaaagtgctgggattacaggcctgagccaccactccctgccttctttctagttttattaatagttgtgagagttgtgttgatgtctccaattataattgtggattttctattttttctttcagttccgtcagtttttgcttcacatattttacagctctggtgttttgggcataaacatttctgactgcaatgtcttcttgatagactgacccttctattattataaaacgtccttatctttctctggtaattttttttgttttggctctgaagtttaccttatctgagagtagtacactcactcctgtattcctctaattaaggaaaacatgttgtgtctttttccatccttttacttttaacctgcctatgttgttatatttgtgtggttttattgttgtttttgtttgttttgtgttttttttgagacaaagtctcatcttgtcacctaggctggagtgcagcggcacaatctctgctcacggcaacctctgtcttccagggtcaagcgattctcctgcctcagcctcctgagtagctgggaccacaggtgcacaccaccatgcctggctaatttttgtattttagtagagacggggtttcaccatgtaggccaggctggtctcgaactcctgacctacctcaaattatccacctggcttagcctcccaaagtgctgagagccactgagcctggcctatattgttatatttgaactgggtttttttttgtttttgtttttgttttttgtttgtttgtttttttttgtagagtgctgggtttacaggtgtaagccaccatgcctggcctgaactgggtttcttaattgaggtatttagatcatttgcatttagtgtaattttttttcttaatttttatgtttaattattatgggtacacaaccgttgtatatattagtgaggtacatgtgatgttagttacaggcatacaatgtgcaatgaccaaatcagagtaattggggcatctaccacctcaagaatttatcatttctttgtattaggaataatgtaattattgatatatgtattagcttggggtgccataacaaaataaaactaggtggcttaaacaacagaaatatattctctcacagttctggaggttggaagtctgagatcaaggcgccagcatggtcagcttctggtaagggctcttcctggcttatagagagagttgccatcttctgggggcagagtgagagagaaagagagaggaaggctgggagggagaaagagcaagagagcataccctggtttctcttcctattgaattaatcctattgaatcatggccctacccttatgaattcatttaacctgaattacttctgtaaaaggccctatctccaaatatagtcccattggtggttagggcttcaacatgggattctgtgggacacaatccaacctgtagtaacatgaagggcttaattgtttttcatttattttgtttgttctctccagttttcatctctgtttactcttttctgactttctgtggcttacttgggcattttttagaacgccagttttatttatctacagtgtttttgagtgtattgatgcataacttttaagtggttgctttaagtattacatatacatgtaacttgtcacagtctgctggagtcatcatttaccattttgagtaaataataaaaatcttaccttcctaatttatgtcccatccctttatcctcctcactgaaaatacgattgtcttaaatgtttcctctacatacatttagaaccacatcagtgttataattttggcttcaaccatcaaacatactttagaaaacttaagaggagaagaaaaatttattgtatttacccatctatttgcttaccttgttctatcttcttccttgatgttccaaggttcctattttatcatttccattctgtttagataacttcttttagccattttcattatttctgggcaggtgttctccccccgcccccatctccattgacatcttagagagggggccccattactggcttgcagaaatgaaattcttagcttcctaattggtcttcttggataccactgcagagtgatgttggagcaccttgttacagcttcaagagggtgaaagtttaggtctcccacttggtctttctggtgtgaatggcagtagagtcacagttattgctatggtatttgcctagaactgaacagttactttctaaggcttgacaggcttgcctgcctctgtcttggtcttttggctagtgatatcagggcttttgttgtaagtgttgttggggctttttctgtttgtttgtttgtttgtgccagttggtctttccaaattgtcactttcttcagctccaagcccagcatatatgtggcaaaaagaaagcccagggaactcactagtatgtcattcctcagatcctgagattctagctgttctgccttctcatttccaccttttagagtcttcttatgtttgttttatatatatataatgtccagagtttttagttgtacttagtgagatgaataggaaaaagtatgtctactcaatttttccagaagtctttgctgtcaacctttactaaattagtaggtttccttttattcctggttttctaaaagtttattttttaaacataaatggttttttacatttaaaaaatagtttatcagaattgactcatttcattgtattttccttcttaatctcctaatatagtgaattatattgagagatttttaaaatgtgaaacatctttgcattcctgggataaacgctatttgttcatcctatagttacacatttactgttggtgttatttagttaatattttacttgggttgttgtatttacttttataaagcatggacgtaaaacttgcctttcttgtatttccttgtttgtttttgtaataaaaatttctctaaacaataacctaggcagattttgttcttcattctgtttcctggaataataaatagaaatgtcttttcaaagggcagcttttgtttttgttcatctattttattgtttttatctctctttttcttttatgactatctttactatttccttcctcctttgggtgtattctgttcctctttacctagcgtttgagttgaacactcagcttattgattttggtctttttttgtgtttcctagtaagtgtatttaaaggtaaaaaatttccttctaagttctgctttaatcatatctaacacattttgatatgcagtgttttaatttttatttaattctacatattctttatatttttcttttaactcacaggttacttgtgacatttaaaaactttttattttgaagtaattttagaagagtagtacaaagaattcttacgtacacttgtccaaattcaatgatttgcaacattttgtcatatttgctttctttttctctctgtctctgcttccctctctgtttttttcctaaaaaacattaatattcctaagtccatttagggacttactctaaatggttatgaaaaaacattagagagaaaaaatggtttactctaaaatggttaggaagtctggagttacatacacacatgcccctttcctgctaaatatttcaatgtatttcctaagaacaaggctgttctcttacataaacacagaaaaacagtcatattaagaaaatttaacttggatataatattagctaatccacagtacatattcaaattttaccagttttcccaataaagaaccttataactccagccactcccagtctcttgtcctgcaatccagaatcaagcatttcagtaagttttcatgtctctttggtcatttttaatgtgagagagtctatcagtttcttatttattcaggttttattaattagcttgaacttatataattttattattttgcccttcaagaactctgctttttttttttttttctttttggtctagtttatctaccagtttttgagagagggtttgtaaaaatcatcaaatgtatttttaaaaaactcaacttctaactgtagttctttcacttgttgctttataaattgtgaggctgtattgttgagtttatatatatttatgattactatatcttcttgtttctttaaaagttatatgaacatcttttcttttgtcctttatgcactttattttttttatttttatttttttttgagatggagtttcgttcttattgcccaggctggagtgcagtggcacagtcttggctcactgcaacctccatctcccaggttcaagcgattcttctgcctcagcctcccgagtagctgggattacaggtgcgtgccaccatgaccggctaatctttttgtatttttagtagagatggcgtttcaccatgttagccaggctgatctcgaactcctgacctcaggtaatccgtcctcctcagcctcccgaaatgctgggattacaggcatgaaccactgcacctggcccaaaatagaatttaaggttaaaaataaagtgcaggctggacgtcgtggctcacgcttgtaatcttagcactttgggaggctgaggcaggtggatcacctgaggtcaggagttcaagaccagcctaaccaacatgatgaaaccccaactctactaaaaatacaaaagtagccgagcatggtggcacatgcctgtaatcccagctactcgggaggctgagtagggagaatcggttgaatccaggaggcagaggctgcagtgtaccgggatcgcaccattgcactccagcctgggcaacaagagtgaaactctgtctcaaaaataaataaataaataaataaataaataaataaataaagtgcataggccgggcacggtagctcatgcctgtaatcctagcactttgggaggctgaggcgggtatatcacctgaggtcagaagttcaagaccagcctggctagcatggtgaaaccctgtttctactaaaaatacaaaaaattagctgggcatggtggcacacctgtaatcccagctactcgggaggctgagacaggcgaatcacttgaacccaggaggcagaggttgcagtgagccgagattgtgccattgcactccagcctgggagacagaggaagactctgtccccctcccaaaaaaaaatcaattctattttgttacatattgagactgttgcccaactttcttttgtgtcatatttgccaccaggtaaatcttttttccctgtttttaaatttcaatctttacatatctttctgctttaagaggatttgccatatgcattcatattaaaaactttcaataaactaggtattgaaggaatatacctcaaaaataataagagccatatatgacaaacccacagccaacatcttgctgaatgagcaaaaggtggaagcattccccttaaaaaccagcacaagacaaggatgccctctctcaccactcctactcaacatagcgttggaagtcctggctggggcaattgggcaaaagaaacaaataaagacgtccaaataggaagagagaaagataaactatccctgtttgtagatgacatgatcctatatctagaaaaccccattgtctcagcccaaaagcttcttaagctgataaacaacttcagcaaaatatcagaatacaaaatgaatgtgcaaaaattactagtattcctatacaccaaacaacagtcaagctgagagccaaatcaggaatgaactcccgttcacaattgtcacaaaaaaaataaaatacctaggaatatagctaactggggaggtgaaagatatctacaaggagaactacaaaccaccgttcaaagaaatcagagatgacacaaacaaatggaaaaacatctcatgctcatggataagaggaatcaatatcattaaaatggccatactgcccaaaacaatttatagattcaatactcttcttattaaactaccattgagatacttcacagagctagaaaaactattattattattattatttttttgagacggagtttttgctcttgttgcccaggctagtgtgcaatggtgcgatctcggcttaccacaacctctgtctcccaggttcaagcgattctcctgcctcagtctcccgagtagctgggatattacaggcatgcgccaccatgcccagctaattttgtatttttagtagagacatggtttcgccatgttggccaggctggtctcaaactcctggcctcaagtgattccccctgcctcggcctcccaaagtggtgggattacaggcctgaggcaccgtgcccggccagagctagaaaaactatttaaaaatgcatgtgaaacaaaaaagggccagaatagccaaggcaatctgaagcaaaaagaacaacgttagcagtatcacactacccaacttcaaactatacagggctatagtaaccaaaacaacatggcactggtacaagaacagacacatagaccaatggaacagaataaagaacacagaaataaaactacacctatgactgtctgatcttcaacaaatctgacaaaaacaagcaatggggaaagtattttctattcaataaatggtgctgggaaaactgggtagccatatgcagaagattgaaactgcatcccttccttacaccatccaccttaactcaagatggattaaagacttaaatataaaactcaaaattataaaaatcctggaagacaacctaggcaataccattcaggatatactggcaaagatttcatgacaaagatgccaaaaacaattgcaacaaaagcaaaactgaccaacaggatctagttaaactaaagagcttctgcactaaaaaggaaactatcaacagagtggacagacaacctacagaatgggagaaaattttgcaaactatgcatccaacaaaggtataatatccagcatctataaggaccttaaataaatttacaagaaaaaaaaaccattaaaaagtgggcaaaggacatgaacacttttcagaagaagacatacatgcagccaacacgtatatgaaaaaaagctcaacatcactgatcattagagaaatgaaagtcaaaaccacaatgagataccatctcacatcagtcagaatggctactattacaaagtcaaaaaataacagatgctggctaggttatggagaaaaatgaacgtttttacaccgttggtgggagtgtaaattagttcaaccattgtggaagacagtgtggcaattcctcaaagacccaaagacagaaataccatttgacccagcaatcccattactgggaacatacacaaaggaatataaatcattctattataaagacacatgaacacatatgttcactgtagcactattcacaatatcaaagacttggaatcaacctaaatgcccactaatgatagactggataaagaaaacgtgatacacatacaccatggaatactatgcagatataaataagaatgagatcatgtcctctgcagggacatggatggagctggaggccattatccttggcaaaataatgtaggaagagaaaatcaaatgccagatgttttgacttataagtgggaggtaaattgtgaaaacacatggacacacagaggggaactgcacacatgggcctattggagggtggaggtgggaggagggagaggttcaggaaaaataactaatgtatactaggcttaatacctgggtaatgaaataatctgtacaacaaacctccctgacacaagtttacctatgaaacaaacctgcacatttacccctgaacttaaaagttaaaaaagagtatttgttataaatcacacatgatttggttccctttttcctccattattagagcctttgttcttttattggtaactgctgaagtaaagatttacttttgcaactcatttcacattctgtttttattgtacaatgtttcttcccttttcttgctttccatttgatagactgatttttttctgctgtattaaaagttatacatactgattctgttcttatggtggttgcctttaatttaacacagtgagcatttaccttttaaaatgtcttaactaccttaatatttatatcttgcctcctaagttctttagcatactcttatgttcttttgattttctacttccctccctctaatgccaattctcctaccaagtagatattacacacacacacattcatttaccctcttttaaaaatatggtcctggatttgttgacaaatcacccttatatttgttgttgtaaatttcttgatttgattctctttttgtgtacttcctctaagagtgtttttttttttttttttttccacgtccaagagtgttttaaatatgagcctttggattctttgcatgataataaatttgttatgccatctcacttgaatagcaattttgatacatataaagttctaaactccagtttattttccttcactactataaaaatattattttattttattcttgcattcattgctgttgaaaagtctgacatcaatctgatcttactcctttgtaaactgttcttttttttttttttttttctgatagggtatcactctgtcacccactggaacctccacctcccgggtttgcctcagcctcccgagtagctgggactacaggcacacgccaccaggcggggctaatttttgtatttttagtagacacagggtttcaccatattggccaggctggtctcgaactcctgtccgcaagtgatccacccgcctctacctcccaaagtcccaaagtgctgggattataggcgtgagccactgtgcccagttgataaactcttctttctaagttttaaaaatatttatttgtctcaatataacgagcataggtgtggatttttctgaagctcctgttaagtatcctttgaacccttttctctgaggtctttcataattaaaaaaaaattgtaaatttattagtcattattttctcacgtatatatttttttcctctcactgtgagttctcttatgattcagatgttgatacttctatttctagcatacattttgctgaactttcttttatatttttgatgtctttattctttcctactgtcttctgggattatctttcatcttatcttttacctcacaaattattcttcagctatatttatcctggtacttgtctaatctatagtatttacaacttctactgttatagttttaacatctaatattctgtctttgtttttgtgagttactggttttgctttatgttgctggtatcttctattatcttaagtatatttgccattttgtttcaagttcttggttcatcttcttcacaattctgcattagatagtatatggtgttaatttgttgtctatgttttgcaatttttttgttccttagccatatcattatgttgatctgtgagctcacgtctccaggagggcaccagctagtctgtggggtaatgtgtaatggggaagagataaagtcaaatactggtctgtgtccctccagatccagccctggtagagagcccagaaacactgtggatctccccatttgccactactctttcaggcaactcctaggaaaagcacagttgggagtaggcaggtgctccacgttgggattcaccagcgctgggagttggggcagtggtcgtgagtagtggagaagagaatacccaaaagctcacccctagtttcatctgttccctactgatttaccttgaagatacaagtagcctggcctgttgcagcctgtttatgtatgaaggggaggcaacaattgtcccaagccgattgggaaggacatagtgcagaaattaaaaagtcttcctgcagcctgttctcccactgtggcttatctcccaggatgcagccctgcccattctctacgcacaccagctcaagacagcagttctgtctctcctggcaaatataaaaacactttatacttatttctggtgttgccagctccccagatccttgcttccttttgcttctctacctttacaaaaattaattttgggtgagggagctggaagcctgaacctacctatttgccatttcacaggaactggaagctttatttctggtcctcaaagggcaaagtgacaagcgacattcaatagctcatggcctgaggcttcctgatgcccagggtcttacactcgtagccaggactgatgtgttgtcatagccattccaagggtctcttttcaaggtgtccaatggggtggcaagcagggattctgattcatctatgctccagggacaggagagaaaggaacttggagattcatgaggtaggcatgaagcttggatagtgggaggggaggaagatagatgtgtgttgagcatttattgtgcactctattgagcccttgctgggtacaccttgagggctaatttacttcacagaatccaggaggaatgccttcaggggtactttcaggaaagtatccatagatttttaggaggctgtgtggtgaagctatgttcatactactagataatatttaccttataggcttcatgatgtataaatctgcctttcctctaatttataatagaagcatccatatgatttatgaattctttcagattagctcttttaggccatcctagctaaatactgagggtgtttagtatcctcagggtgctttgctgcagctgtccccagctggtctcgttttttcctattttctaattggtctctacccccattcctccctcagtctgtcttgacagatggcagatgcatcttcctatgtggcagtgcttggcactaggtttgcagcaaatgcttgttggattgattttctttagatttgaaggttaaaaagagagtttttctctttataggcacccatcccaatttcttctccttgcaatgctcagtagttgctaccaggaagggctgtcaccaggttgtgtcctaactggaatgagctcttgagtgggagtaagcaatgtttgttggtaggtcaaagggttaacaacagttttaagctcttttttcccatgggaagatgaactccagtttaccttatacttactgtttctttgaaatgtactgtttggataaatgtgaaatgtcagctgtattttaaaaaatcacatttatttatttatttatttatttataagtgtggaaatgacccctggttggtgaactacatctatgctgggcagactgcgggcaggcatttagacttggtggacctatatgaccagacccgtatgaaaacctgttgggaaatgtaggccctggactctgttatggtgtgtttcttgaatccgaatatgcctgttttcttggaatcctcactcatgggttggtataagatgtggttcctgtcatgtgagagattcttccatcctagaatggctcccccgtgcctctcccctactcctgtggtcttgtctactatgaccatgcatattcccatgagatgagagggttaagaatcagcatctagaatacataaagactcctgatgaagatgtctaatgctgtcaggctgacaagctatgtttccatatccaatattcctctacaaagctaaataaataagttgccgtataacagcccaccaagtcttttgagtgtgtatgttaatctgaacccaaggcacaactaatttgtatgaagtaagcattgtaggattttttttcctacaaaaataactttctcttcattgctgaaattctgttgtaaataaacaagtggtaagcagaggatcataaaatgttccttgctcaaagccttaaaattcccaaaactccagcattcaaatttctctggacagaattggaaccaaaatgaagtcacagttaataataaaacattacatttgtgtaatgctttgaatattctaaagattttattctacttttcctgtcttctcttctctgactgactcaatatggcttctcttgtacctgcaaaaagatgacttcaaaatccatttctccaattttgaacccactacagtacttgatatccatgtatgccactatttagaagcaaaggaaataaaatcattgaaatgacactttgaaatagacttggtaggacctgaaaactcactgaatccaatcttctcactcagacagttgagtggacagtggtttaatccactgaaagaggaaatacaagggaaggacatgtttgagaggtgtttagagaatgattgataaaaggtcttagaagaggtgagtgtccactatttttgcactggagtatctacccctgctccaaggtccctcatgttcacatctgttggggatgatgggagggccagaagacagcccacctcatggaaataagagtagccaggctacatggagtaggtcgggaagcaaggaggctcaggaccaaggaaaggtttatcgaataaatattatgaaatgctcagctggtatatgaagagcagtgagggttgggggtatcaggatcacaatccatattcagttccaagatgtctggaccatttcacagttgggatatggtcttcctctaaggaagaacatgggctgtttttttcatacttctgatcacagttggcaagaaggaatggttggagtaatagactagtagttgggttcttagatttgtttcttaatcaaattctcatggctaatggcaagatagaatatgcttatacaggacatttatctgaaagttgtgttacagacaacatccattagaatcatccagggtacttcatgaaaatgcagatttctgaataacctctagaactgctgaattaggatccctgggctggagcctgagaatttgcatttaagcctacttcttagcaattcttatgtacactaaaatttaagaagcatatgtaagctggttaattatgaattattcttatcaatgaaaaattataccaaatgagaattaaatgggacaactggatatttcattgctttgaagaagctggtgacaacttcatctaagacttcccagttgctctttcagtattacttctaaatttactattgcagtttatttttcattaaatcttccttctactggtacaaagaaaaatatctttgtcttcccttttaattttatttatttattttgtttgagacagagcctcactctgtttcccaggctggagtgcagtggtgtgatctcggctcactgcaacctccacctcctgggttcaagcgattctcctgcctcagcctctcgagtagctgggactacaggcgcctgccactatgcctggctaatttttgtatttttagtagagacggggtttcaccatattggccaggctggtcccaaactcctgaccttgtgatctgccagcctcggtctcccaaagtgctgggattacaggcgtgagccactgcgcccggccaattttattttttaattaaacatttctgagacattttggctttaatgaaaatgtttccaaagcatgttcaaagcgtagtccttagtttgatggtctgaagaatggaatcatttattagtggagttcaataaatatttattcgcatttatacatacaaggtcctttggacagagtaagagacacaagacaccaccactccctgaaagagcacacaaaacaattacatagataagaccaacacacacatttgaactgtggtattgaaacttaaaaaaaaaaaaagcctaaagccctctcagtaaaaaagagttgagtacttatcgacacttacatgtttatttatacattatcccatgtactagcatatggcttgactatatacaccagaactcacactgtaacaaatagaaagtttataagttaccaaaataaatagaaactttaacacttccttcctgtatcctcaaggatcatttgcacattccctgtagtgtgcacattccattttgtaaaccagtgtttttagaaaacaatgcctacctatatataaccaagcactaagttctgtgttacagattaaaaaaaccattttagagtaaagagaaataagagcaaacccagactactagaactggtaaatgaaaggaatagcattcagaaaacaatgtatattcaataaatagataaaataataggaaacatttgctttgggttcatgtcaaagcctattaagaaggagacatagacataggacaaaatgcatatgtagaggaaaaagaaacaaaatatagaaatgtaaacattacttccttctggcaaaatgtcttctagcctttggtgaggtatttccagacatttataggctacactctgccaatgattttatttaaggatgacacagtgaatgcttatttttatgtctacaaaaaaagttacaaaatttagttattcacacattcattcatcagtgcctcttgatattggaatgtttctccctattgctttatggattgactgtattcctgaaaagcttgaattatattttaaaaactcagccataagctttgtgggagacagactgtacctgtcaagttccctcttgtatctctggcacctcgcatagcatcaggctcatagtgaatattcaagaatgtcctctcgatggttgcaatatatttgaaaatctcagcattgaaaggaattctgtgacaaaccacttaaaaaagttaaaatgaatgaacattcagtaaattctgattttgatgaaacacagttgttcataagtggacaaaactatcctttaagtaaacccatggggacatttgagttgaataatttatagagacttataatctgaaagagagcgcagacatagtctcatattcttttaccacacagataaggaaaagctggagctcacagaaacttgaaagagcttgcccaaggccacatcactatttaggagcagttattttaatatgtaacaaattacgtgtgattaatctttttcagaaggggttactgcaggttttcttaaagtaacagtattagataatattttataaaacttaaaaactctataacataatgcttcataatgtttaagaattcataaacatttagtaaaaatattaaaaacatgcatagcaatgataaaactgacttcacattggtggttatatctgggggcagtgaaaagaaaatggaaggattcagaggtatcaattttattgtagtcactgatttattaaaaaaaccattgaaacaaataggacaaaatactaagatttaataaagctgggtgtttgggtaatgggggtttatttgcctttctgtgtgtttaaaatacttaacaatacaaatattaaaactaaaattagtaagagatttgtaaactaataggttttttaaaataccaagcagaggaacaaagtcaactgttatttatccaaagaaccattaacagaaataggctatatatatatatatatatatatatatatatatatgctaaagggtttagtcaacaaagtagatattctataattagcagcatgaaggagttagagtacatcttatgttgttataattaatagtaaatatttgtaacatacagaaaatacatggaacaacagtcatgcaaccactactcaaatacagttgtgctgtttgcacctgacttcaggtccacctttcttttccctcaccagatgcaattactagtttaaagttagtgcatatcatttgttattatgttgtgagaattgtccttgtgaaatatggacatttagtttattttaatggttgcacaatttattgtagaaaggcaacacaattttatttacttttttatgcactgatgggcatcccctgactttccaccaattataagcaaacctgcaatgaacatccttatgcatacttctttgtttttgtatttgagaatgtcttcaggtctctagggcatataaacatagaattgcttgtctgtaggattcttgtctctttaaatttgtacaacactgcatatgtgaaataagtagttgaaataagtgggaaaactaacccttccaccaagattctatgcaaattcccatttcttcacatttctgcttcagcacgtggtattgttaggctatctaccttgagataataaagttattctacatttcccccccaaagctttaaacctttaccttttcacatttagccttttatttcatttaaaatttatttttgtaatggtgtgaggtagagatctggtttcatttattccccatggtgatagcctatgttcctgcaatattaactgacttatccaacagttctcaaaatgtgatcagaggattcctggggatgttggaagggagagatcccttggatccttttagagggtcaacaaggtcaaaaatattcataaaattaagatgttatttgccttttttttactctcactctcataagtgtacagaagggttcgccaaagacaacaatggcatgtgatgaatagtgatgactatttctctgatacctaacagattgtgtgcctgtgtattgtattttctagagttttcaaaggtagtgagtttacggtataagtatgtagttttcagaaattatttcttttctaccatgctcttaccagctatcttcagttatacctgttataatctctgtaatctcattatcttccaagaaatcatttttaaatcctaaagtttttccttttacacagaaacataacaaaaattatgtttactttgttgttttgcaataatatatttttcaaaaatgtttttaattaaaaaattttatctgaatagggtggatggttggctttaaaaagggagaagagaaaacacattttctggtgtctagattgcctatgtctagagatgctgaaaaggatgacattgacatatcagcaagttatctgattcctcataaaaaggagaaatctattccaaagaaactgagcacaactatacacaacaaaaatatgttgaaagtgatcttttgttcagctttatagatgttaataatttatcatattgtgtcttgtgcagtaaaacattttcaaacacttatatggttccaacaaagttgcagtatcattttgggaccaatcattcagaatttattaaaaaaaggaattaaataaccgaaatgtagatgtaatacactctttaaaagcttcttacaggataagccatcatattgtattggctagaggagcacacacaatcacagagagactaataaaggcttgaacagttgacattgctgaatacctgctggatgaaaaatcaccacaagaatgcatagtgctggcattttccaatgatgcaataacttgtcaaattaaagatttaactgcaaacataaagactgagttaatatatcatctaaagaattgtaccttagccttacaaagggactgatctacagatggctatacatcctgttttgctttcattcatcaggtatcagcatcaattgaccattgatgatcttcttttatgtgaattctgggcaacaggggttctgaaacattaaaagtgttatatgacttttttgaatctggtggtttatcctcaacaactgtgttaactgtgttaacatttgcactgatggtgcaaaaatggtggattttatccaatggtgggtaaaatgactggtgtcttagcacgaattaaggcaatggcaccaaattttattagtagtcattgtattcttcaccaccacacattcgtagtaaaaaaaaaaacagttttactaaaataatgtccttgatgaagttgtaaaaattattttctactaaatctcaacccttaagcacatttaaaaaaattctttgtgacacaatgtgatgtacccataaaacacttctactgcatgctgaaatatagttgtcttttggaaaaacacttgtttgagttgcaagctgaattagccactttttcttttctttcatggaaacaccatcttttcacttggaaaaaaaaagtgacagaaaattgattattcagacttgggaatttggcagacattttcttgaaaataaacagtgatactatcactttagggaaaacaactagttgtatttgttgccagtgctaaaatttaagcttttaaaagtagaagttggaattttgaaaagcttgtatctgctactgtgggatacttagaattttttctgatatcagcagcaacattaatgaatataatatttttttgagacagggtcttgctctgttgttaaggctggattgcagtggcatgaacagggctcactgaatgcagctctcaaccttatgggctcaagtgatcctcctgcctcagctttccaagtagctgagaccacagatgtgcactccactcttggcaaatttaaaaaaattttgtagagatggggtcttgccatgttgcccaggctggtcttgaactcctgggctcagacagtactcctgccttggtctcccaatgtgctgggattacaggcataagccactgcagccagtttgagtttttgatattgcatgaaatgtttgaacatttcgaatacctccataattcagtaaacagatatttcctaatgaccatataatgttacagaatcttacatgagtaaaaataatttcaaaatgcggataggccaatagatttcaatgacttcctgttgtttatcccctgaaccagaagatttacactcaccctagattcttacctttccctcaaccccttcattctattactcagtactcagtgtaaattccacctcccagacagcagacagctcttaagtgtatgctttcctgttcattactatttctaatgccctcattcagaactctggcaacttactttatgatgtcaaatctcttacgtagcataagaggccactgcccacctctcttctctagcttcccccatttcactgtattgtctagtaagctgatcttattatagcttttttttttttttttagacagagtctctctgtcgctcaggctggagtgcagtggtgtgatctctgctcactgtaatctccacctcccaccttgagcactcctctcgcctcagcctcccaggtagccgggaccacaggcgcacaccactgaacagggataattttttttgtttttgtagagacagtgttttgccatgttgcccaggctggtctcgaactcctgggctcaagtgatccacctgcttcagcctcccaaagtgctgggattacagccactgtgcccagcctattatagctctttataaaacaaaaacaacaaaaaaaccgaacatattgattcatgactccctacctttgcattcacatgattcctttgcctggaatgtcccccttcttctacctgcttgggaattcctagctatatctactaaaattctattcagatgtctttttccaggaagcttttcttaacctaactcacgccattaagttattcgctttatttttctaggttatcttctatttgtttctactgttgtactcatcattctgtaaggtattggggctctgtagaatttctgttacaaaattactttttggtttgataatatttacctacattgagcaatcccataagaaacaggcctgtgaaactctctattgggtttcctaaaacaatattgttgagagattatttaattacctagctttctttttatagggacttgccagagaaatatatttctggtcttatcatattagttactcttcagatttgttttagaaaatagtcaccattaacaccttttagaattggttggtggaaagtttccaatcaaaatcgtggtccacctctagcaagctgtaaaattttatgatctccaattagcctcagtttaaactctagtcaggcatttagcttcacaaaaactgaagtcagggatagtcagttttcccatattagtagagagctgggaagtgctgatgtgcacaacctgcagcctgaaatagttgctttttctaaataacagtaaaactgttgctctctgaggatggataggtggatgctatttgttgtttgcaaagcttagggaaccctgtggttgagattttttccaatacatgcattttttttccctttgcaaagggactttggataattgttaattttcccaagaatataattataattcttttattgtttaaatagagttaatagtttatctacagtttcactttctgcagtttcagttatccatggcttgaaaatattaagatattttgagagaaagaggaagaaaaagaggtgtcagtcacataacttttattacagcacatcgttacgtttctatttcattattagttattgttcatatcttactctgcctaacttataaactttaacatgcatatgtatgggaaaaaaaacatagtatatataaggtttggtactatctgcagtttcaggcatccactaaggatatcagaacatattctctgcatatttaggagcaattaccgtatgatatttttttctttctgtgtaaacacatggtgtcatagtccattttgtgctactgtaacagaatatcacagactaataacaaataacagaaatttattggcttatagttctgtaggctgagaagtccaaaatcaagatgctggcatctgggaagggcttttttgttgcatcatcacacagaggaaggtggaagggtgacagagagagcaagaaggggctgaacttacccttttataacatcaccaatcccaccctaatcacctcttaaatattccacctattaatactgttatcatggcaattacatttcaacatgagttttgcaggggagaaacattcaaatcatagcacatgggttaggtgagaaatgaagagtgaggtatacaagagcatccagaaccatactatatacattccagctgttttggtgtagaagcagcacaaatgtagaaactgcattgtttcttgataaaagggtcctggaaagatgaccagctatacagtttccactagaggaaatgcagattggcttgtacgactttagagtatgaaatataaagatctggagtctgttccatgttttttcaggactggtgtgactatattatggataacgaaggaaaggagcctcctttgaaagaagcatctaaattagggatgggctcctcatttggaggatgttagaaactacgaatcaatgtctctcatgttcaatggagctcccatttttatcggtttcatgagactattattaatttatttgaatccaagatgagtctcaaatatacccagaagaaaaaaaattaagaaatgaaaccaagactcctaatgctttgaatgttcgtaacattcgagaaaaatttgagcctgggctatataatcaaagtctaggatttgtgaacctaacagggttccactgtcacctgttttcaagagagtgctgagaaaaattccaatctataccttaaacaattaggttaaatgatttaaagaaattagccttcagaggactgaatttttaatgatttttctacttggaaaatgtgacttctaaataaaaaaagtgcttgcttattataaaaccttggttcaaaggtaaatactatgttctgacaagtgtaaaataagtacaagcacatgtgaaaataactgttaacagcaaatgcttaagaagtgttcttgttttctaaaataaacatttcctgttcctaaagtttttggatcagaaaatggaaaaatataactctagttaatggggatatgcaatttgactgtagaccaataattaattgtcataaagactttaaaaatccttctagattaataatgtgtagaggagtcttagaggattactcagtaaaataaattcaaggtaacaatattaatctaagtttctttaatattcttgatctgggtaaacattttcataaattaattttgtgaattttgagtttaaaatatgtcctgctctaatttcaccatgtgtaaaataaaaaggcaatcatagtattttagtccatataaaaccatgcctccatttataaaaacagactttttttggacagtttaacagttacagaaaaactgaacaggaattacagagagttcccgtatgtcccctcaagccctcttccctccagtttccactattagtaacatcttgcattagtgtggtacatttgttaaaattggtgagccaatattgatacattattaagtccatagtttacattagggttcactctttgtgcagttttattggttgttatattttattggttttgacaaaggtatgacatgtatccaccattacagtatcattcagaatagtttcactgccttaaaaatcctctgtgctccacctattcatccaacccttcccatggaccactggtaaccactaccttttcactgtctccatggttttgccttttccagattaccatatagttggactcatacaatatgtaatcctttcagattggcttttccttagcaatatgcatttaaggttcctccattatccagagatggttttagttgtcacaacttgggtagagagatcaggggtcaatgctactggcatctagtgggtggtagagactgaggtagctcatgagcatcctacaatgcccaggacagccccctacaaaaaagaattattcagccccaaatgccaaccatgctcgaggttgagtaaccttgtgttaagagtgacatgtggcatgagaaatggggcggttttggctcatgttgtgatattctagattcaggtatttccctgagcagagaggctgaaatgctgaaaatttttcatttgatgaccttgatgcttcctttcctgaccatcgtaaagaacaaatggctcctttgctttggcaagaaatactgaaggtggtggcttttttctgtttgttttgaaatgaagtcttgctatgttgctcaagccagtcttgaattcctgaacttctggtctcaagtgatcctcctgactcagcctccagagtagctgggactacaggcacatgttactgcaccagccttcaacgtgattttttttatttcattcaggtgacaaactcatgctgaggttcccaatttttgtctcagagctaggatattctaaatttgtaaaaaaaaaaaaaaaaaaaaaaaagttaagaaatattaactttctatgaaacactctaaatactaacaaagagcttggtgagttctcccacttacctgtgtcccatctgtgcttcagttgcaaatatatatatatatacacagagagagagagagagtcttattctgtcacccaggctccagcgatcctccctccttggcctcccaaagcactgggattatagggatgagccactgcccccagctcagttgcttattttgcattatttcaaggcagtggaggcaaaacgctcaaaattaatttctcacagatcaacatcacatcttggagtaaaacaaacacatattgaaggtattttaatgtatgttttcttgaacttcttctaactaataggggaaatattttcattaacttttaccaaagatttctggatagtgtaaatatatttttctatttgggtaacagtttatagtatgctgttatttctctgttcatttatttatttttatcatatacctcctagagtaagatttaattgatggaatgttttgtggattctgctgtaattaatgcacataatagcagtcagtaatagatttctgtaaacctatatttattaattatctaataccttctccttcattttgctgttgatttccactaagtagattaaattgtgttcttaaaaacagaaattcatttgtgtatggatacaaaacagaatgttcccaaatgcaatcttggatgtgatgctctaaactttagaaatccagcttcatttattttggattaatttctcccgcttggaggctgacacactgttttacatctatcaaatgcatgattataaaattaacaattttgtacaataatgaaattaaacacacacacacatgaactgtaaactatacagcaccatctctgtgtcatagttttaaaaggcacttccagatgacataaaaaatgaagagatattttttaagaacctattgatttttgatctccaattttgtgtgtggggggttgtttttctttaaccctagttttatctaatttgagattcatgaacaaggtatctctaagggaaagagcagcaggtataattattagttattttataagactttgtgaagtctttggtatagttctaaaaacaaagtgaaagaacctaatgtatgtataaaaatagttttgcaagtcaattggtttctaattctttgctttcaacaaaattgaagaagaaccttatacttgagttgtcagctgacagattattaaaaatattatttaataatagcccattatgtgagttttgcatacgactaagaagaaattttaaaaattgggtgaagttgcctcaacaagtctttattttctcattcatttatatcccagattcattaacaataagtaacatttgtcaacatgaaattgggaaaataaagtccctatccatctcattaagagatgcatttctagttaaattttaccattacaaacttacacttttatttaccaaaatgtgtattacagattgagcatccctcatcagaaaatctgaaatgctccaaaatctgaaactttttgagcaccaatatgatgccacatgtaagtactgtacttaacacaacttcgtttcacatataaaattattttaaatatggtataaaattaccttcaggctatgtgcataatgtatataagaaacataagtgaacttcatgcttagacttgggtcccggcctcaagatatctcattatgtatatacaaatattttaaaatccaagataatctgaaatccaacacacttttggtcccaagcatttcaaataaggcatatccaatctgtactgacattattttgatctctaacagttggtaatcctatcttaatccatataacttttttttgagacagcatcttactctgtcatccagggtagagtgcatgcagtggcacgatcatggctcactgcagcctcgacctcctgggctcaagtgatcctcctacctcagcctcccaagtagctgagactacaggcaggagccaccatgtccagtaattttttttttttttttttttttgtagagatgaggtttccctatgtgcctaggctggtcttgaactcctgggctcaagtaatcctcctgcttcagcctcacaaagtgctgggagtacaggtgtgggccactgcacccagcccatataacttttacacttacaacaagaaattaaaaattcaatgtaagaacatattttgttgcaaagaagcagaataggtggctcaataaaagatttccaagaacaaagaaaaaaattacattaggatgtaaccagggttgagaactcaaaaaaaaaaaaaaaaaagaaaaagaaaaattctacatggggggtagaataaaaatatgaattcaaagtgggaaaaaagagcaatgtaaaatttccaaccattaagaaagaggttgtttgtatattttttaaattaatgataatgggtgtcaaaacattatgatatttagattgaattgaacatatgagcgattaacagttttattttaaagtgttaatatggagaatatgttggaaattatatattttttgcaactatctggacacatgttgacaattttaggtctgtctaagtctatgggaggaggcatatgacatttcacaatccttgtaggagagatgtgaagggaagacccctgagctattcttcctccttcttgtgttaccccagtaggaaaatggacttataactggagaagagaagctaggtgtcagcagagacatgatggagtggacatttctttcagtcctttaccaggaagtcctctcaaactgaggaggaacatactaagggagagacacactagtcttgaagcccatggcattcctgaagatccacctcacaccccaaattaccaaaccccaaagctctcttcagctcagtaggttgtcctttaattttcagtaacccttccctacagcagaagaaccaatttttcttttccctcataatttgaatccctcccactaatttatttgaagatgaagatattatcctcttttactaccagtgaaaatacaatgacttgagaagagaaaatgatctgtgtgacgccagggtagaagtggaagttgtgggccctcgaataaaccactagtcttatacttgaagcaggataaacaataaatgccaaacccaaggcagaaactagaaacatggaggaaaagaggcataaatgcctcatattagacagttacattctaagaaatctttcttgcagcagttactttcctacaatgaccaacttcctctgactccaaatttactccttatgtacacttgggttagatattcctttgactatccaatcataccattgtatagtaccatttacacatgcatacatgctcacctaaagaactttttgtgtgtgtgtgtgtgtggtttttttttttaaatcgagtctgggacctggtttcgctccattgagtcactggtgaaaaatttagtaaatctacgaagagagtttagtaagtgtaagaagagtctgctcactgtgtgtgatattccaatagattcatgtgttctacacacagggatctcttggatataagggaggcatttctcaggtgtctgggtgactttctggtcattatccaggttcctggctcagcttcccaggtctctttgaataagcagaggggatccacattcagacaaggctcctggggctctgaccagaggggctggacatccctggtagacctgacattgggcactgagactcctggaaaacttaagctgttaattttgcagttctccatcttgactgcttctcggactgaccatcagttggtgggttttcatcagccttctgcctcacctcctctgatccaagcagcagcagggactcacttgcatgcactggtcttgtaggcagtgacttttaagccacatcctctgtctaccaggctaaacttgcctgcctgagaggcatactccttccatcctctatcgtacatctgtgagctaccaactctggccctagtgtgatactgccagaatgttgtgtacctcatctatttagagtgggaagcccataaggcaaactgaagaggccccgtatcctcactccctttctgctcagttttttcatttatattatctcaacttcactctactaaccagagcaccaaggaagggtaggttagcaattacgtctatgatgactatagagaagtggggagatgacttatgatcctctttgtgctggattccctactgaaggcatctgatggcttctgatttccctggtctgagaagaaagtccctctccacctctccctccttactctacctcaggctgaggggctcaggcaaccttttatgttgcatatggcataggtatctctgcctcactccagaagggaccaaccaatagccacctactcacctacttctgaggtctagtgcctacagacctggtgttcataaatttaagttctggatttaggtctcctttcctgtagccaggtgatcagtgaccggcaaaaatcaagatcccagacttcctgagtaacctcatcaagactgaggtaacagctcacatagctagtgcatagacagatgcaggttacatggagtctgaatcccgtacacatttggaggctccctttgggactgctgggatgcatgaaacatgggatttcactcacagttgtgctcactatgtgtgatattcctatagattcatgtctctacacacagggatttttgatcattctgaattgttgattcccataaaaaatgaatacatggtgatcactgtatatgctgcattactgaatacatatttacgagagtctccaacacatctttacacgtctgaggagtaaaagaatttcccacagattagcttctggttcccatttcaaacctcatttctgttccacctctggcattgggtgtagtatggctccttagtgctccaggccaaaataagtggcacaggggtaaagtcatttctggtggggggtgggggatttggagaaaaaaagaaaggattgcaggggagtacactgggagggttaggagaaattctggagatacggtccactcaatggaggcacatacaaccaagctgagaaacgacatagtacccaacagagttgggagatgtgaaacccaaacatcaatctccacctgggcatagaggaaatactcgatttccaagcaggttctaggttcagaggagagagcccttggttggaagcgccggtcttgcaggatggggtgggggcgttaatgcaaacttctggtccagcagaggtagaaacagaccagatctaagtagcagctcagaggcagcggacttgagggatgaagacgtgaggcccagagggtggtgcctggcagagaaaacagctgccagacaccaaggccacctcgggttaaagggaacaagttatatccaaaaaaaacccaacacggtgaaaataggaagaataaggatatcacctggagtgttctcctgagacactccccaagaacctggattctttaacaatccctccagagcagggacactcagcacatacatctcccacaaagtaaagtgtctgaaggcctgggcaaacccttctccctccccttctctctcctccacgggccggcccggaggaggctcagggatgagaactactgtcactgctgttccccacctcaccccaacgagagaggaatctttagaggtctgtatccctccttcaccaccccgcctgagcgcctgctggaaaacacaatcaccgtctcaaatctcaccctgcaactgcatccaagcgctttctccaagcgttcggggagccgccggaactcttcttccagacaggcgttccgagactccgcacaataggcacctacccttggggttttgagccgcagtgtctgcctctgttcaagtatccaggctcaggtacagacctttcagtgcaggcggcgggaggcgcgaacacggaggaccccctcaggcatactgccgcccgggcggcgcctgacagattgcctccttgggatcggcggacatgccctgggcgctccagctccgcgcgcctcagacacaggctatgattggcctggctgaacgtcaatcagggctcggcgccgtggaggcgggaggaacgctgtaggcagaggccgcttaactccctacggggttattctccgcctcttctagggtaggcaggtgttcccgagtcccttagggggggtccccgcggcggcctgagatgctcggcgccaggttgtcgcgcccttgagctggctgaagtagacattgactctggagagtctgcgtttttcctggtcccagagccgtggtcccgatactgcgcttcccgctcctccagtcccagctcccaggctccgtcttctcccgcttggcgctggagaaacaccggaagagagagtcgcagagtgactgctgtggccctgcgacctgactgccaccttccaggactctagccctggctccttctaaccttcccgcccctcagtgccccagagaggctggtttgcggacaattattcatcagccggaagaaaaggaggtgccagtgttaggcgcagaagagggttggaccagaaaagctggagaggggcaagaggggaaagagggggaagggggaaggcggaaggcggaagaagtcgggaggggtaacagctcgagcttttcctctagcgtagtttctcttctctcggtgccgccccatctgcttcttgcctcagttccccactcgcacccgtgcacctctgcggcaggcgtgtgaaaggaatgggagggggggcttttggtcgggatatctggtcctccagaccccacagccttggctgagaacttacttaagcccactccaactgacttgataaatgagaatcttgaccagcccactggtaggtagaaatgagggacgtcatctatccctgaatggaataacgcgaaaccgcaggtcacgtggatgtgggaatccacagcactggctgcgctcctaaggctcctaagtccacttccgaacctcatctaagaccctgaaagccagactagggacacattggattattattattattttttttatttgagacagggtctcgctctgtcgcccaggctggagtgcagtggtgtgatcttgtctcactgcaacctccgcctcccgcgttcaagcgattttcgtgcctcagcctcccgaggagctggatctacaggtgcgcaccaccacgcctggataatttctgtatttttagtagagacggggtttcaccatgtttgccaggcttgtctcgaactgttgacctcaagttatcctcccgcctccacctcttaaagtgctgggattacaggcctgagcctctgcgccagtcctacacgttggatcttttcccagacctcctcctcagacgtggagcgtacaaatgatgctccatcggttactctgatcctgactttgggactgccagataaaactgggagaaaccctacatttactcttactgtaacgtattggcttgaaactgcaggtcagaacccatttatgttgagaccaaaagactttttttccaagtagaatgaaatagaataaaatacaattgaaaatacttgcctgcatcacaggtaatgagagtaactatagtttcatgaaaccgttgtttcagttaaatatgtttttgcgtgtgtgcatgtgtatcgggaggagatatgtatttcatatatatatgtagagaggtggaaatcaacaacaaaactccataatttttcttgttttctaacagttcttgattttgagtaaaaataattctttaagaacaaaattttgagccagctaacgaaagatcagagtcaagcagcctctcattggggcctgaatagaggttcatcttatttggctttttcgtttttttcctatcttgtggactccttttaaggcccagcaaggaattaccctccccaagtttccactctctgcttggttcagccattcagctgtctctcgggctctttgattaataaaaagtccagtagagctattttatcctatgcatgtgtgggaagagggcaatgccagtgattctttcctgatttgacagaaaattcacaaatcacgttaccttctgaagatagagattttaagctcaaacattatcaccagagaactgaattattaagaaagatgagtggtcaaaagtacagatgttttacagattaagggtcattttgtcaggtcctgtccaaaatatttgaagtctaggggtttgaaaaattgttagaaataaccatttatgacaacagttttcatttattgttctctccagcttcaggagcaggggagaacatttttttccttcttaccttgctgagaattttttcaccagggtttcaaggctaagaactgaaattccagcattgacattgaattaaaaagaagcaagcccttttaggaagtcaaattttattatatgagatggaatgtaatattgagattacttattacttaggcatgggataggggggcttttaacaacagaccaaaaaaaaagttggaaggataggaatgaaataaagcaaactttcattattcatagatgatacaattgtctacagagaaaaataatctaaaacataagaattaagagtttggcacagtggttggctaaatatataaacaaatctattgcattttctataaaaacaaaaaagtagaaatgtgattaactggtttatataacaaacttacagtacagttgacctttgaacaacatgggcttgaactgtgcaggtctacttatatatgattttcttctgcctttgccacccttgagacagcgagaccaacctctcctccccttcctccttcttagcatattcaccatgaagacatgaggatgaagacctttatgatgctccacttccacttaatgaatagtaaatatattttctcttctttatgattttttaaataacattttctttgcttttctgagacaaggtcttgctctgttgcccaggctagagtgcagtgttatcatggctcactgtagcttcaacctcctgggctcaagcgattctccacctcagcctcccaagtagctgggactacaggtgcacgccaccctacctggctaaatttttaattttttgtagagatggggtctcgctatgttgctgaggctggtctccaactccttgtctcaagcacttctgcctcagcctcccaaactgctggaattacagccatgggccaccgcacctggccaacattttcttttctctagcttactttactgtaagagtacagtatataacacataaaaatataaaatatatgttaaataactttatgttattggtaagacttctgatcaacagtaggctattagtaaagttttggaggagtcaaaaattatgtgcagatttttgactgcacaggtggtcagcgctactaaccctcgcattgttgaagggtccactgtaatcaggaataaattctcaaaaaggaaaggcatgcaagatcttagtggggaaaattaaaatcattaaaagaagttgaagaagtactgcacagatggagagacacattcatggttaggaagcatcaatatcattaaaatgccagttttccccaatgtgatctatagtttcatgctatttctagaaaaatttcaacaaaatgttttatagaattggacacaatgatattaaaatgaaacgaaggaacacaagttcaagaagagccaaaataccattgaaaataaagaggaagttggggaatttcctgactacatgagaagatattatatacaccactggatttaagaccatgtgctattattggtgagagagggagtagacaactgggccaatagaatagaatggaaagagtgtcaggaccccttgtatgtgaagaatggtcattaaagaccagtgggtaaaggatgtataattcaataagtttgaatttatgacactggattagtggatatatatacatcataataaattccagatgaactaagtaccgacgtattgaaggcaaaactgtaaaacttttaaatgaaaatgtgaaagaaatatttgtatgacttcaaggtagaaaaatatttattaaaaagacacacatacacattttaaaaacaaaaatgttaagagaagatgaataaatttgaccacattaaaattagaaactttaatcaaaacacactctaaaggaaaaaaagccacaatctaaacttatttatatcacacataatttacataggatcaatatccagaacatctaagaatagccccataggaaaatgatcaaaagatgtgaaagggcagttcacaaaaagggatatataaaagaccaataaacgtacaaaagttaagctcacaatagttatcagagaattgtgaattagaacagtccttgaaataacattttaaaatcactaaatagacaaacattgaaaagtctaacattatcaaaaatcaatgaggatgtagggtgaggggaactcatactctgatggtggacttcaaactgaaataatctacttggaaaaaaattggcattttgtagagttgaagctgagaatatcctaaagcatagcagctctacccttaaatatatatgcaccttagggaaattattgaataaggcaccaagagcaatgtgcaggaaaagtcatgagagcattctttgtaattgcaaaaagctggaaacaacccagtgtccatttgcaggtaaactgatacacaaattttggcataatcataatgtggaattctctgcaacatcaagatcagtggaatacagataaaataataaacttgcataattcttaaaatcatattgttgaatgaagaaaacaacagaaaactacattttgatattaattatgatgttaatttgttgtcagacaaagacaatatttactatgatgaaaagcaagataatgatcaactccaaatttggaataatagttgcattttgcagagaggaagggagattctaagggaagacaaatacaggaaactttaatgttaagggtaacgttccattccttcatgtgactggtgggaaaaaatggatgtttaaaattcttgtagatatgcatcacatgcattacttatttgtagaaaaatatttcaaaaactggatcataagaaaaaaggaaaaagatgtataagaaatcatttgcatagagacagaagtaacaaaggcaatttgatgaaatttattgagacagaagactaaaaaatgaaaaaacatggtaaatataaaaatatgatggcagaagtaatccagatatatatgcatttgtaatgtccatttatatcattgcattaaatctaaatttttctgctcagtaaagatggtctgtgtgtgtgtgtgtgtatttgctattcaaaaagtgctggtggcaatggcttatacctgtaatcccagcactttgggaggccaaggagggaggatcacttgagcccaggagtttgagatcagcctgggtaacatagcgagaccctatctctacaaaaataaaaaaattagccaggcgtggttgtgcatgcctgtagtcccagctactgaggaaactgaggtgcaaggatcgcttgagcctggaaggttgaggttgcagtgagccgtagtcgcacccctgcactccagcctgagcggcagactgagaccctgtctcaaaataaaaacaaaaacaaacaaaaagcacctaaaacaaaatgacaccgagtgattaaaccaatggacaatgataaactcaggcaaatgctaacaaaaattaattatggatagaaatactgtcttactccattttgtgctgctataatagaatatccaagactggataatttttaaagaacagagattgacttattacagtcctagaggctaggaaatccaaggttgagaggcctgcatcttgcaaaaatcttctggctgcctcatactgtggtggaaggcaaaagggataaaaagagagctgagagagagaaagagaaagagagagcgcccaagtgcaacaggttgaattcacaggcttttagcctttttgtaattggcattaattcatttatgaggatggagtcgtcatgacctaaacacctctcatcattaagcctcacctactaacactgttgcattgaatattacatttccaacatatgctttttggggacacattcaaaccattacaaatactaatattgaacaaagtagaataaatgatgaagaaatttttcagtgtcaaagaaggatactttattatgctaaaatgtacaattcaccaactacccataagttataagccttcatatcctaaacaagtctttgaaagttagggaaaaaaatgtgctttgttaggaaggataaattgacacatttaagagcttttagcatacttttaaactaaactgtcatatccaattgtaaaataatgtgaatgtaagatattttgctaaagcaaataatgatcttaagttatcaaatatttataaaattgtgtactcaacaaatagtgaatgcatattttcccaaacataatgcattaaaccacaaagtaaaattaaatagaaattagaaactacacgggctatattctctcaccggtataaaacacatacatagaaaaacaaaacaaaactaaaataaaacaaaacaaaacctcaccaaaacagtactaacaagaaagcctccacttggaaacttaaaaacatctcactaatttttgggttgaaaaggaaatcaaaattgcaattcaaaggagttatgtttttgctaggaatatggagggaattcagttcagaattcatttctctatatagtacagcaaagagaatgaaaaagaaaaccacacaagaacctcatttttagtgaaactaggaaacaaaaagtatggttacatcccaaattgcatgtcatttgtgcttaaagcaacggagagcagaactgggcataagaagccaaaatgttgctgtggcaacagatgaaagcgtggagggaactagtggtgcgggatctcggaaagggcccgaaaatattctctctctaagagtagaagccagcctaggttggagctgttggcagttggcctgagctacagtgaggcccagatgctggggaaggcagaagaaggcccacatattgggggagcagactttgttttggaggttccaaggtggcagataacaaaggttccctctggaatgcagggggtcctaacaccgtggtagaatccttcctgaaatagattaaattccccaagttggaaaaaacatggatgcagcgtattttaagataaagtttacgtgttagtaataaaggattggtccttcggttgtaaaacctgggaggttactattgcccatgtcttctctcaccaacccatcatcccacccccatccaataggagtcttccactaatatctggtccaggaatgctcaatttattcagaataagtaggaaaagaaatggcacagttccacataaatatgccatgagaaaaaaatgtttacagaaagcagcaagatttccctccagaagtaatgaagcaacctcagccatgaagatcatggagccaaaaggatgaccttcagcagaagcagttacgagccaaagaggtccaagggcactgagggaggagccaagtggtaagggccacctctggctgggatccagggtgcccaagtgggaaaatgagcaagccagagagtgcttggtctagggattaagaaaagcacacagtaataggttggacactaaatttgaaaatgaacagtgagaaaaatgctgtggggaccaggattgaaatgaagtaacagaacaattaaaattacatgatccagggacagagacttgaactcataaacaggcctgtgttgcccattagtcacaaggggagcagtgagccattgttaaaatgccaaggattcccaatgcagtttacttggaactttgcccagcgatgaaggagtctgacttgtcttttctgtaatagttagaatcaaagaaaaataaagcacagctggtgggagggtgagaagcaagcatcatgaaccacggtctaattcaaggatcaaactgctgtccagttctggcagattttggattgcaaggggaataaagctgagaggccatattggcacctaggcacagtgaggtgagtctggccacgcatttaagaagcccctgcaaaatgatacaggtggttactaaaaaccacctctggcctctggaaaaaaagaaatagcatctcccggataagaatatctgggtctcacacctattgaccaggtcgagatagggttcagttggggatgggatataataaaaggcatgggtaaagaaactgggcagaggcatagtgcctgcatgttggagattaaggagggaattcggaactcatttttctatatatattacaacaaaggttaagtttggaggttaagtaaggatgctgcagctcactcatggttgcttttccttcagagtactcatgcctcggcttacccagggggactcaaggagaggaatgtgtgtgcgcatatctatctatctatctatctatctatctatctatctatctatctatccatccaccttctaatctacctaaatcaatcactgtgtgtatctattccaaccacaatggactcctatcattcaatttcatttagtggtacatctcagcccagtttacagaaaagctgtaaagggctgtaaaaggctgtatgagaacataatctgaaaagcgttgctcaaaagagcatattatatattattgggcatttatgaagaaattagatctcacactgagctagttaataaagatttataattacaaatgggctgcagcatgtgattctgaacttgactatttccttttgcccttcagtttcagactatgatatggattatgattctctaccaccccctagtggaaattcattcatttctttttaagtcctgtttcttctaatcatttagtctaaatgattagactaaatgagaaaattacatagtaaatatctggattcactcttgttataaaaggttcaaaccggccgggtgcggtggctcacacctgtaatcccagcactttgggaggccaaggcgggcggatcacaaggtcaggagattgagaccatcctggttaacacagtgaaacccccgtctctactaaaaacacaaaaaattagccttgcgtggtggcgggcgcctgtagtcccagctactcgggaggctgaggcaggagaatggcgtgaacccaggaggcggagcttgcagtcagccaagattgtgccactgcactccagcctgggctacagagcaagactccgtctataaaaaaaaaacaacaagttcaaaccatacagaagggtacggagtaaaaggtctcctttgtttctccctcctccccattccattctaggtcccaaaggtaactgtgtgtagtttgtgttatactaggatatttcctgtgcttttacacattccaggtatatggcaggaaaaatcctgagacatcaactgaggattattttcctcaggcatctttctacaacagaggcagataacgcatttcccctcatgccatgggagacagaccacagcaaaacagcaatgaccaaaagattaagatttttcatttaaaattttacatttgaaaaccatggtaggccaggtgtgatggtcacatgcctttaaccatttaggaggctaaggcaggaagattgcttgagcccaggagttcaagaccagcccggacaacatgacgagactcagtttctacaaaaaaaaaaaaaaaaaaaaaaaaagaaaagtaaagaaaaaaaaattagctgggcatggtggcgctcacttgtggtttcagctactcaggaggctgaagcaggaggattgcttgggcacaggaggttagggatacagcaagccatgttcaggtcactgtactccagcctgggtgacagagtgagaccttgtctcaataaataaataaataaataaataaaatagaaaacccagtagaggccaaatgaaagaaaggtctttggagatgaaaaaccttagattactagatatctgaagtcagcacttgttccataaataatagatttgggaagtactccggataatcttagagccaattttcttctgtggaagtgataagaatccacaggctgaagacagaaagagtgtcaggaactggttttggggtcttgcactctgtaatccagttaaactgtgtgacagagggtcagtgcctcctccaactcagatattttgggcatacaaggatgggatcaaagagtgtgctgtttctggtctacggaatattacaaatttgaatgaaataaaaatatttctgacagtttctaaactctcttttcttagtactcaatagaatggactgtcatccatgctgggtaaggaaagatcttgacaaggaaaggaaggaatcagggtttcatgagagacagggttctagggatccaagcaccatgatgaggtaatggctaagttttctcttgggtaatgcaaagaaaagttgacctttactgctgtgaagcaaattagaagctaacccggggtgcattcgtttggtttcttccagaagcatccctgacacagggacatgaatgaaagtaatttattttggaggtgcatgaaacttcagtagcagctgagtaaaagattgggaagggaaaacagccaacgaagggtgaatgactggaacttaatcccctggggaaattctgggaaagcacttgcctcagagttaacccagccacggaaggagggagttgggcaattgtacatcaattcccattggttgaaggctgctgcctgacacgtgaactcttcggcccttctagtctgctgtgagtcgggcagagtggcccttcttggctttgaggaagccttcaggaatgatgcaaatgtccagccagtgtgcactacagtggtaaggcccaaggaacatggcaggtattagtagcatcagccataccaggtctatttctagttggagaacccttagatgactggagcctgtgatctcttacatctgtaatatctgtgatcagaatggaagaattttctattgtcttttccttttcaattttgcccaagccttcataaagttttgttaaaactttgacaacagtcttatttttacattcctttaatcaagaaggacaggcctatgtccaaatataggaggatgtattagtttgctagggctaccataagaaataccacagactgaatggcttaaacaacataaacttattgccgcctggctctggagtctagaaatgtgagatcaaggtgtcagcagggttggtttcttccgaggtctctgtccttggctggcagatggttgtcttttccctgcatcttcctatggactgccccctgtgtatgtatgtcctaatctctttttatatggatactagctatattaggacctactttcataacctcattttcacttaattatctttttaaagactctaactccaaaaaaaattcacgttctgaggtactgggtttattcaacattatgaacttatagggggacacagttcagcccaaaaagaggaaaatggggcaaagggaaaatccttcttctccatcttctttcctgttctctctcaaaggccaaggtgagtgagagcaacattggatcatgggatcttggttgccctgcaactcaagagatatttggcttcaacgttagcagtgagcaacagcagagctgagaacagtggtatagaactgagtcacactgagtcaggctacatttcccaggctaatttgcaaaccagaattccagatataatttttattcactcaaactttccactcatgaacttcttaaatgtattttgaaaaactatgcacatcctcatacatgttttttaaatttaactttttattttgaggtaattagagagtgacatgcagttgtaagaaataatacagacagaaccttttaccctttaatccagtttccctgatggtaacatcttataacacttcagtacagtattgcaatcaggatattgacatttgtgtcaatgtcaatattacagtcaagacagtatttttgtcactccaagtatcccttatcttgcccttttatggtcggttcacctccttcccacccccatcacttccttaaccactggcaactatgaattttttctctatttctgtacttttgtcatttcaagcttcttaatacaaaatgttatacaaatggattgtgctttttttttcttttcaataaagtttattttatttatttatttattttttttgagatagagtctcactctgtcacccaggctggagtgcagtggcaccatctcagctcactgcaacctccacctccaaggttcgagtgatgttcatgagtcagcctcccgagtagctgggattacaagcatgtgccgtcttgcttagctaatttttgtatttttagtagagacgggtttcaccatgttggccagctggtctcgaactcctgacctcaatgatctgcctgcctcggcctcccaaagtgctgggattacaggcgtgagccaccacgcccagcctggattatgcttttgatgtcaagcctacgaattctttgcctggccctacatctcaaagattttctcctatttttctaaaattttaatagttttacacttcacatttactctgtaatccatcttttttgtttctttatctatttttagagatggggtcttgctctgttgctcaggctggagtgaagtgacgtgatcacagctcactgcagtatgtaaccttttgggactggcatttttcactcagtataactctctggagattcatccaggttgttgtgtgtatcagtcattcttttttattgctgagtattatttcatggtataagtgtacaatagttggtttaaccatttacctgttaaaggatatctgggttatctttggctacaatgagtaggcagttagacaaacatttgcatacaaggttttgtgtgaaggcattgtctgtgcttgtgtatttgtgtatgcaagttttcatttcttggggctaaatacccaggagtacagttgctgggcaggatggtagtagtatgcttagttgttggatttttgttgttgttgttggttttgttttgtttttaagaaactgccaaatcatcttccagagtggctgtaccattttatattcccatcagaaattatgagagatccagtatctcttcttccttgccagcatttagcattgtcgccttttttttttttttttgagaaagagtttcactcttgttgcccaggctaggtacaatggtgcgatctctgctcaccgcaacctctgtctcccgggttcaagtgattctcctgcctcagtctcccgagtagctgggactacaagcatgtgccaccacacctggctacttttgtattttcagtagagacagggtttcttcatgttggccaggctggtctcaaactcccgacctcaggtcatctgcccaccttggcctcacaaagtgctgggattacaggtgtgagccaccgcacccagcccattgtcactatttttattttagccatcctgataggtgtggagcgattatctcattgtggttttaatttgcatttccctaatggctaatgatgttgaacaacttttcatgtgctaatttgccatttttatatcctccttagtgaaatattaccttaagtcttttgcctgttttctaattggatttttaatgtgttttctttgttgagttttgagagttctttatatactctagatactagtcctttgttcaatgcatagtttgcaaatattttctcctactgtgtagctcattttttcatccacttaccagatcttcacaaagcaacagttttacattttgatgaaatccaatttatcagtttttcctttcatagatcatgctctcaatgtcaagcctaagaattcttcgcctagacctatatctcaaatattttctatttttctaaaatttaagagttttatgctttacatttactccataatccattttgtttatttattttaattaattgtatctggtaaaggttaaggtattgcatttctctgacatttttttttttttttgaaacagagtcttgctcagtcacccaggctagagtacagtggtgtgtcacagcttatgacagcctcgaactcctgggctcaagcaatccttctgcctcagcatcccaagtagctgggactacaggcaggagccaccacaccaacattatttttcatttttgtgtatagacagggtcttgctatcttacccaggctggtcttgaactcctggactcaagcaatccaatccagttggaattaaattttgcataaggcgtgagacttaggtcaagtttcatttttattttattatcttgcctatggatgcccaattgttccatttcaccattgttcaattcactatttgtgaaaaaggctatttttcttccactgacttccttttgcacctctttcaaaaatcatttgggcagattgtgtgggtctttttctacgttctctattttgttccactgatttgtgtgtccattcctctgctagtaacacacagtcttgattactgtagctataaaacaatacttgaaatagggcagactgattttcaactcactttattcttctttttcaagaatgttttaggcgtcggcgtcgctcccgccctggagctctaggcccgcttttccccgcttgagtctggcgtcggggtcattgtgtcttgacaaccgctccggtacccctttccgaggcagcaggtgcggccgctttagccttgagcgggctccgcgtctgcctgctggtctctgctagtgccgacccttctgttcgcggaccccacgccaagcagcgaccctgagccgacaggcggagcacccggcaatggcggcctccacggcctcgcaacggcccctcaaggggatcctgaaggacaacacctctacgacttcctctatggtggcgtcggccgaacatccccgtgggagtgtccacgagcagctgagcaaaaaatcccagaagtgggatgaaatgaacatcctggcgacatatcgtccagcagacaaagactatggtttaatgaaaatagatgaaccaagcactccttaccatagtacgatgggtgatgatgaagatgcatgtagtgatacagaaaccactgaagctatggcaacagatagcttgctaagaacttagctgctgctgaaggcttggagccaaagtatcaggttcaggaacaagaaagcagtggagaggaggatagtgacctctcacctgaagaacgagaaaaaaagcgacaatttgaaatgagaaggacgcttcactacaatgaaggactcaatatcaaactagctagacaattaatttcaaaagacctacacgatgatgacaaagttgaagaaatgttagagactgcacatggagaaagcatgaatacggaagaatcaaatcaaggatctactgcaagtgaccaacagcaaaataaatcacgaagttcatagaagggatttgttcaacactcttattgtttgttagatatgaaccccgttgctataatacattgcttctcgttctccacaagtcatgacttaagtaccaaagtgcataccagttattatatattgccaagaattaaatgaaaaccttaaagactgattagactgaaaatgcctaattgatatatatattcttgtgcctagtactttaccacaaatacggtgtaatatcatcagtccaaaactgtattacttttgtaaaaatactggttaatttgtatattatatagcttttcatgctttagaggttaaacaatatctttggggggggggaactaatttattttcatcactctaaatgtggtgatagctcttataaagtttgttgacttttttttttaaccaaaagccaattgaacaacaggatatatatgctgataaatattcaggctgaatagtattttaacacttgtcttcaacttgatttgtctgtttaattgaaaaggattgtgacctggcacggtggctcacgcctgtaatcccagcactttgggaggccgaggcaggtggatcacgaggtcaggagatcgagaccatcctgactaccacggtgaaaccccgtctctactaaaaaaaatacaaaaaactagccaggcatggtggcgggcgcctgtagttccagctactcgggaggctgaggagggagaatggcgtgaacccgggaggcggagcttgcagtgagccgagattgtgccactgcactccagcctgggcgacagagcgagactccgtctcaaaaaaaaaaaaaaaaaaaaaaaaaaaaaaaaaaaaaaagaaaaggattgtaagagttactgttacattttctggcctactacctttaaaattcctgttgcatttctttgtatttacaaggaaaagactgaactttttctcatcaaaactagcttttttctcacaggttaaacttgcaccaatgtctgctctttttttttaatgtttttggtactctgggcagacttcagttttttaaaaaataaagattctaatgcagctatcttggcattccctttaaatacctgtcttaacctcctacttttatttcctactcctttccacacacatgcatacaatcctttaccttttaaagaatcattaagactgtcacacattaggaactctttcgctcactcttctgtcatttgctgcaatattgaaattcttattttgaccatcaatgcctattaattcttctaatacatgaagaaaatgattgagtagcagcagtactataggtgggaaatacagtttaactgctgaatttttatacctctctgatttatagcttgctaattaaattgctattaatagtttgtttggcttaattagacttaagaaaacaacaggttttttttttttgaggtttttttttttttttttgcatgaggagagaattgtatgtaaccagtgatatgattattcctgaatgtacagacagaagtaagcctggacattgtttaatttaaaaactttagtccctgctttaagggaatatgataatgtatactatgacaaatgtactttattcttctaacacagtaagaattacttggaactttttcctgaaactaagtgcaggaaagccctgtgtgtcttggtttagtgatggtttcatttctagccatacaactgatggattgtatacaatttttgttagtgccaaaataatctgttatatgaacagacttctaaaataatttctgtatattatatatgtaagaaggcttttattgaacagcttattttccacttgcaagtttatggaaatatcaatatgtcaaaataaaaagtgggacaattctttgctgttagaagaatgtgcttattattttgatttcttaaatggtacataatcaaagtactgctgaactataggtgcagtattctactaaacatttcagctagtaataccactgatttagaaacaaaactgtttatttttgctttctgaatttagaatgctgggattacctgtttaaatatgttttagggaatatagagattaaatctgtacatacctgtgcacatatattcatgcaccctctgattttggttttctcgtttttgagttcttagaaagtatccacatactcttcttttagtagaagtagctgttttagagagaagaaaaggatgagactttaaatagttgattctttttgtgttttctacaaacttttttgaattttaaatcacaagcaaactaattttctggtttttagaaagtagatgatgatttcagaggagtaagacatgccaaacagcgtgctcggtaggattttaggtagtcaaatgcagctgagaaaaagtattttcaagtcataagttgctaattgatatgctatgaactagtcaaaataggaaccatatgattcatgttagattttcctctagagatggatctgaatgttcagttccagccaaggtagattttactttcaactttttaatcaatatcactttctgtgcttaatctctttggtgttaccttgtccattttcatttgtctaaaattctgcagggatgactacaatttggcataatggtataaatgaattgttaagggtaactttaagttgaagattaaagcaagatgccattttccccatgtctttcattttgtttacattttttccctttaagttagtatacactacacatactacaataaaatataataatatgaaaaaagaatattttagatattctagtccctttgcctttccatgtaaattttagagtaatcctacctataattaacaaatcttgcaaagattttgattggaattgtgttaaacttgtatattggtttggggagaattgacatatttactatattgaatcttccaatccatgaacagtatttctctccacatagatagagactgaatagatcttctttgatatcgttcaccagcattacatagtttttagcttgcaagtcttgcatgttttgttagatttacacataagtgtttcatgtatttgagtaattgtaaataatatatttatatttttgggccaggcgcggtggctcacgcctgtaatcccagcactttgggaggccaaggtgggcggatcacaaggtcaggagatcgagaccatcctggctaacacggtgaaaccccgtctctactaaaaatacaaaaaattagccgggcatggtggtaggcgtctgtagtcccagctactccggaggcaggagaatggcgtgaaccccggaggcggagcttgtggtgagccgagatcgtgccactgcactccagcctgggcgacagagtgagactccgtctcaaaaaaaaaaaaaaaaaaagaaaaaaaaaaaatatatatatatgtatcatttgttcattgtgagtatgtagaaatacaattgatactggtttatcctgtattctgttaatttgctgaaatcacatatctagaagtttttctgtagcttccttgtgattttctacatagacaatcatgtcacttacaaatgggagctgtttatttcttacttcacaatctgtatgcctttaatctcctttttcatgcctattgcactgtctagaacttccaacactgtgaataagagtggtgagagtggacattcttgccttgttcctgattttaggtagaaactattcagtctttcagaatcaagtatgttcaccataggatttttgtagacgatctttatcaagtaaagaaagatctcctctactcctatatttctgagattaaaaaaaaataatgaatgggtgttaaagtgggttaaatactttttcttcatcaattgatatgaacaagtaaattttcctcttcagcctataatatgatggattacattaattaattgtgaatatccaaccagctttgcatccctgggataactctcacgtggtcattgtatataattctttttatatgttggtaaattccacttgctaatattttgttaaagattgctgcatcatgaggaatattagtctacagttttcttttcttcccattgtcattgtttggttttggtattgaggtaattctagctttataaaataaactgggaaatgcttcctctgcttctattttctggaagagattaattggtgttaattcttctttaaatctttggtagaattcttcattgaaactatttgttcctaaatatttccttttgtgagtttttaaattatgaattcaatttcctcaataggtgtagacatttttgaattattttatatttagtgagttgtggcactttatattttttgagaaaatgatccatttaatttaagtgtcaaatttatgtgtgtagaattgttcatagtattcttttgttatccttttgatgtctgtagaatctttgatgatatcccatttcatttctgatgttggtagcttctatcttctgtcgtctttttttctgagtcttgctagtggtttgccaattttattaatctttcaaagagccagctctttgcttcattgatttttttttgcttttgtttttctgttttcagtttcattgttctgcttgctttttattttgttattcttttactagattcttgaggtgagagtttagattattggtttgagacttttcctcttttccaatgtatgcagttagtgctttaaatttacttctcaaatgcaaatcaaaaccacaatgaaatgccatctcacgccagtcagaatggtgattattaaaactcaagaaacaacagatgctgacaaggttgtggagaaatagaaatgcttttacattgttgatggaatgtaaattagttcaaccattgtggaagacagtgtggcaattcctcaaagatctagaaccagaaataccatttgacccagcaatcccattactgagtatatacccaaaggaatacaaatcattctattataaagatacatgcacttgtatgttcattgcagtactattcacaatagcaaagacatggaatcaacccaactgcccatcaatgacagactggataaggaaaatgtacatatgcaccatggaatactatacagccataaaaaggaatgagatcctgttatttgcagagacatggatgaagctggaagccattatcctcatcaaactaatgcaggaacagaaaaccaaacaccacatgttctcacttataagtgggagctgaacaatgagaacacaaggacacagggaggggaaaaacacacactggggtctgtctggggcgaggttggagggagggagagcatcaggaaaaatagctaatgcatgcttgtcttaatacctaggtgatgggttgatatgtgcagcaaaccaccatggcacatgtttacctatgtaacaaacctgcacatcctgtacatgtatcctggaacttaaatttacctcttataactactataactgtatcccacaaattctgatatggcatattttcatttttgtttagttgtgtttattgtgtgtatttttaaaaaatttccttgagacttcctccttgacccatgtatttctaagtgtgttgttttgtctccaaatgtttagatattttcctgttgttgatttctggtttggttccattgtggtaggagaacactttctttatgattttatttaaaaaatttgttggtcttttattgtcttagatatggtctatcttggcatatattctgtgggcacttaaaaaaatgttattctggctgggtgcagtggctcatgcctgcaatcccagcactttgggaggctgaggtgggtggatcacctgaggtcaggagtttgagaccagcctgatcaacatggtgaaacctcatctatacaaaaaataaataaataaataaataaataaataaataaataaaaaattagccaggcatggtggtgtgtgcctgtaatctcagctactcaggaggctgaggcaggagaattgcttgaacctgggaggcagaggttgcaatgagccgagattgtgccattgtactccagtgtgggcaataagagtgaaactccatctcaaaaaaaaaaaaaaaaaaagtgtattctgccatggaatactatgcagccataaaaataatgagatcacgtcttttgcagggacatggatggagctggaggccattatccttagcaaactattgcaggtacagaaaaccaaatactgcatgttctcataagtgggggctaaatgatggacacatggacacaaagaggaaaaacacatactggggcctattggagggtggaggttgggaggaggcagagggtcaggaaaaataactaatgggtactagacttaattcctggatgatgaaataatctgtacaacaaacctccatgacactgtttacctatgtaacagacctgcacatgtacccctgaacttaaaataaaaggaaaaaaaagaaaaaagaaaaaggaaaatctcgtggaatctactaaaagcaacgaaaaagaaaataatgtatcttctgttgttgggtggtgtgttctataaatgttgattagatcttatggtttgatgttgtttattcttctatgttttttctcaatttttgtctatttgtttaatcaattgttgagagaaaactattgaagtcttcaactatcattgttgacttgcctattttcttttcagttctatcagtttttgctttacataatttgcagccctgttgtttggtgcatacatatttaagattgctatgtctttttggtagatttacccttttattattacatagtgttcctatccatttctagtaattttctttgttctaagtttatttgatattaatatagcctccctttattattttttgtctgatatatgtttttctatcctttaacttataaaccgcctatatcattatatttgaagtgagtttatcataaacagcaaataattgagtctttttttttttttttttgagacggagtctcgctctgttgcccaggctggagtgcagcggtgtgaagtggtgtgatctcagctcactgcaacctccacctcccgggttcaagagattctcctgcttcagcctcccgagtagctggggctacaggcttgtgccaccacagctggctaatttttgtacctttagtaaagatggagtttcaccatgttagccaggatggtcatctcctgaccttgtgatccacctgccttggcctcccaaagtgttgggattacaggcgtgagccaccgcacctgacagagtcatatttttaaatctattctgccaagctctgtctcttaaaattgatgtatttaggcgatttatatttcctataatattgttatgtccaggcttaagtctgacattttattttctgttttctgtttgttctctctgtttttcatttctttgttttctttttcattgcttcctaaataattttaaaattccattttaatttatctatagctgtgtgtgtgtatgtgtgtgtacctctttggatagctcttttagtggttgttctaggtattacattatatttatgtaacttatttattgtcattaattaccagtctgagtgatgtgtagaaatttcttctctctttgtttaccctccctcatttataattgcctgtaatattttctctatatacatttataaccatatgatacagtattatacgtttttcttcaatcctataatttaaataactcaagagaagaagtaaagtccattttttaacccatattttttcttgccatgttctttcttccttcctgatgttccaactgtcctcaatttaactttttgtttttttagggtagacctgttagtgacaaattctgttagttttccctcatctctgtatgtcttaatttccctggatatttttgctgatatagtgttctaagttgatatttttttttcctttcagcactggaaaaaggtggtgacctccttcgggcttacacagtttctgatgaaaattttgctctgtcatttttttcacctgttagatgtcatttatctcactgctttcaagattctttttatctttaatttttagttaattactatgattttggtgtggctttctttgggtttgtcctatttggggttcactcaccttcttaaatcactaggtttatgtcttctgccaaatttgggaagttttcaaccatatttatttgataatttttttcagcttcactctctttttcctctcattttgggactctgagtacatgaacattaaatcttttgttatagccccatgggtccctgaggctttgtccattttttccagtgtattttctttctttcttttgttcagattaagtgattgctattgctgtgtcttcaaggtagctaattctttcctctgttctctccttctgctgctgagcttatttactgggctttttattttggctattgcacttttcagttctaaaatttccacgttttcttccgtatatatcctatttttatgctgaaacatcctatttttttcttttctgctcttttcttcttctttctttttttaaaccactgaactggacatcctatttttttcattcttttaagtgttaattgctcatcaaagcattttaataatggtggctttaaaatcttcatcaggcttttctttccgttttggcatctattttattgtcttttaaaaattcaatttgagatattcctggttcctgatatgacaaataatttccaattgaaacttggacatttcaggcattatgttataaggctattggtcttatttaaactgttttagctggcttcttttaacacctctccagcaggtaggcaggtgagcttcatgacgccaggtaggggtaggagtccaggcttctcactctgccttcattgacacctcagataggtccccattattactgagtggggacagaaattctggctccctattaggtgcccactaatacctccctggttggttgggagaggagtgccacttactatccctcacatgacctttattgacaccaagatgggacagtggagtggaggagtgagtggtaggtatcagggagtggttgctggattaactctgggtggtgatgaaaatcctgactctccattaggcattgtctgacatcaccctagaggagaggggaagagatgcttcattactgttgggtgaggaatggaagtctaggtttccattgacatttcaggggcttggggaaaggagtacattttcaccaagagggcatgaccatcctgactccctattcactttctctgacaccatcctggtgtgtgtgcatgtgtgtgttgaagtgttgggttccttatgacagcctggtgagggtgaaagtctaggctcctcatttgaccttagctggtgggggtggagtcgcagttttttctgtggtgtttggctggccccattacccaagatggagtgtagtggtgcgatcatagctcactgtaacctcgaactcctgggctcaagtgatcctcctgcctcagccttcagagtatctaggactatgacacatcgaactatgcctgactaattttattattattattcatagagacagggtctcattatgttgcccagggctggtcttgaactcctggcctcaagcgatcctcctgcctggcctccttcccaaaattactttaaatgatataatagctgacagcttgaataggtcctctttattttgttggaggcagagtgttagaagtgacctaacaaaaaggatttgtttcttgtcactagactcattcactgtgtcaatgagtgtgtcagtggtttgtgggaagcaaacttaaatgaaaatgtatatttttaattaaatgttatgagatgctttttttaaactattggctcttgtgaatttcagaaaaatattgcaagtcatttgacttagctacttagcttgcactctatgtaaaaattttagaattttacctctttgaaaaactcctaatatcaatagtgatattgttgttttgcagcctcaaatgattttgttactttggactaattttcactgagctagttaataagtgactttttattgtctaaaaaattcttaagtgtatcatagagagaaagattattgggtcactaagtggctttctatatatatacctttgtccatatttaatttttgcaaaactcaaattaaggtggtaaacttagtgtggatatacattcatgtattgtattgataagattaactacgttttaaaactaaagtggaaagttttaaacaaaattgtcattcaactatatatgtatttctgtaaaacacacacgtaatgatgaattcgaattaataagcaaaaaaggagaggatttgtaatttaaaattgatcttggaatatacactctacacttaagacagagaaaaaactttttctttccctttagcataatctgcccagctagcggtggtttcttatcagaatgctctcacttaataccttgataacttttagtgctttgtgctgatagcatcaagtttttaaattattttaaaaacaaacaacaacaaaaaaccatttgcttctgaaacacctaaagtttcttataattgttaccttctttatgtttattttcaaatgttttattgtcactctggttattgagatatcaaagttataacaattgctcactctcaggtacctatgcacttaagtgaccagtttctctgaaaattcttttttgttgttgccttcttccaacctcataccctgaattcagaatactaacactgtcaagctatttttcacgcccccaaatctttgttttttctcactagacagccactacccatttggccactaggtggcgcaaaaggcttaatttttcaccttcctccgcctactgtgaaggaagctaaaagtaattagatgtgtttggcatgatttttatattttaaattaacgctgtactatcaaaagaactacctgtgtctcaaacccacaatgtggtaaaagctgacaaataaaaaacagtagctcaattttctagattaattttgtccaggttaaaaatattattgatatatgttttagtgaccacataggtttcagtaagggtaaaaggatgctcttgttcgtactccaagtctggcatggtgactgtcaatacattcattttgaagaagattttgcttctgggtttagccctaaaacaggccaaatagagacgataaaatgagtggaactgaattagagcatttctgaaaagttttatttggttaattctgccccttaaggtcagaaattgtgtaggaaaagtgtttcaaaattataaataaggcaaaattgtacgtgcttgattattttatatcacacttgaacctttgctcataattctgcctgatcaaaaccagagtgtttcagggattgtaatttgcctaagacgaacccggccagccctgtgcgattagaggttaatcagcagagagctgataagggatgctggctttctctttttctccggtaaagaagataacaccaaggttatgattttattgccctctagcacgttagccattttgaatctctagcctagaaattatttcctcacagagagatacagctctgtttttcaaatactctttggatcaaggctcttgtattcttgctggttccctctttgagtttgataaaactttgaaaagtctaccaaagaaatttctctcagaactagactttagagaggaaatgctggaactacggatgagaggcacatgtatgtacagggtcagaccacgcagagagcaggtctgatgagccacaccactgctgctgccccatggcttctagacgctgctgttggttctgttgttaggacctggaggttgctgcagccaccactgaagacacctcctaaaccacttctgtttcaggaacttcacttaaaaaaaaaaaaaaaaaaggaaaaaacccaccgcttccccaaaagacagttgcttcttctgtcacctttgccagagaaataaatacagtaaaaggtgctctgcaacccccacaccctggttcctcctgtggcccctttgtaactgaagtcttaggtggatgaatttaattggtggaacttaggtgctctagcttcaaagaaggctaggggaagtgagctttctggtttccactttagggaggcaggactcaaaaggtaggggaaatttcacagtactctaaaggtgttcaaatcccatgggcagccagtaaacatcacaggtgtgaggtgctgggtggagtggctgccgtgaatatgtgttttggttcatggactacatcagtggctcttaaagtccagtaattcacagattcatgagagataataaaatgattatttttgttttaagccattaagtttggagttggtgtgctgcccagcaatagataatggaaacatacagtatgtatttctgcaagtctggcttcttcacttaatattgtttctatgagattcgtccatgttgttacattttcagtagttgatgaagtttcattgtttacatagtactgtgttgcacgaatagactacgttttgtttatccatttactgttgaagaaccattttgttaaacaatttgagagtaatctgtggaaattatgccacttgacccctaaatattttgtcatgtataatttaagaataaggacatttctcctgcaaaaccctaatactgtcatcacccccaagatacttaaaattgataccatattatcaaacacacaatccatattaaaaaatcccctattgtcccagtaacaccttatagtaaatgtctgttattttaagcgggtgtcattcattacatggcaataggtaactaatacggtgagtctgcttcttccagcaaggaccctcagggggtgcggtgattcatagttctcactcagacttctctgtgtctgctcatatgtccctatttcatatctcagggtccggtctatcccaaccaggggtcttgccttatcacaacagctgctgttggatgatgcaacaaacatttctacaacttcataacctttatcataagcccccgggcttgaccctcagccatatctgtgctgggttgcaggagaaaagatagcctttaaaactgctatagaggcatttacagtttttcattcatgtcttgagtttggattaaaggcttttaatttgtctttttttcctttgtatgctcttgagggcagtctgacgcagccagtctctgaaggttggcacaaaagcctccatcgagtcacccagcttttgcctggtacctatcctaacctaaaaccttgccacatgttaccttggcgaaaggccagtgccacacttcagtgatgattcggctgtcctacttggttagaaccgagttcacttccttcctcaacactcctgccacattgatctggaagtttcaccttgagccaagtgatagttaattttatgtgttaacttggctaggctatggtttctagacatttgaataccagtctagatattgcagtgaaggtattttttagatgagatttacatttaaatcaatagattttgggtaaagcagattaccctccataatgtaagtggcccttccaatcagttgaaggtcttaggggcaaagactgaggtcctccaaggaagagggaattctgcctctggaccaccttcagactcaagccgcaacatcagctcttcctgggtctccagcctacctgcagatttcgaccgtgccagctcccacagtagtatgagccaattacttaaaataaatctctctctgccaacatcctattggttctgcttctctggagaatcccgactcatacaagccactttctatagaaggctgtttcttcgagaaatccaccctcttctatgtcaacagagtttagaatctccatactttatctcttcatttttgagaacataaattctgtattacacatacttatactatactatatatgaaactttcataaacattgctgggcaaagttgaatattgctgaaccaatttccgatgcttctgaataagttcaatggagttaaaacatttttcttcttacatggtatgtccagtgccccagagccagcagagttaagaacttggtaaggaagaccaaagataatccatatattctagtttgttatataatataaaacatgtttattagattctaaaagacataaaaagaaaataatacatatgtatcagtgagagaggtgcaaattaggaagagaactaaggattattcttaattcctgccttcctttctaaatcccaatcctcaattgaactctttaattatatttcctgtttattttattgaatggaaaaaatggaaaattatctaacatttgtcatggaaatataggagaaattactctcagagatatgatgttatttaagtcattgacatattgttaacctcagatgcaaatggtggaattaataatattcctcagttcatggtacatagtcactgttggtctagtgctagtttgtagttgtatttgtattttttattttttagaaatacggtcttcctttgtcacccaggctggagtgcagtggtgtgatcacagctcacagtaagctcaaactcctgggctcaagcaatcttcctgccttggcctcccaagtaggtaggactacaggtgcatgccaccatgccagctaattaaaatgttttaaatttatttttggtaaatggggtcttgttatgttgcccatagtttttagtgctatgataagctagtaattatagtgaacattcttgtcttggatacccaaggtttttccgttatgtatactagtggttacagattttttggattataacctttgccaaaataggaaagttttgattcctgcttccttaactgtttttcaaaaatcacaaatggatatactttaccaaatgtcttttattaatagactgagcaaaggaaatgacttttctatgaatatggtaaattatagcaacaatatgttttattatattgaaccaccctagtattccaaggattccctatttgatcttgatgtatcattattagcataatcattattattattgttattattatacatatttttagagacagggccttgctctgttgcacaggccgaaatgcagtggtgcaatcatagcttactgcagcctcaaactcctgggctcaaatgatcttcctgcctcagcctccctagtagctgagactacaggtgctcaccatcacacctggctaattttttaattttttgtagagacaggatctcacaggatctcagtatgttgacaatgctggtcttgaactcctggcctcaggcgatcctcccacctcggcctcccagtattattatttgtaatattgttgaattcggttcataaataattatttttttctcccatctgtgttcaaggtgaaatgggtctattatttttttttccttgagttttccacaactcaatttggagtcaagattacactcggctgataaaattagctaatcaggtttagtttttttctgttttctggaaaaagtatataatatagaagtttcatgttccttgaatgtttgatagaactcatctgtgaaaccatctgggcattttcaaaaatatatttttttattagatgccattgataactttaaaaattgctttaatactcattggtatagtcaagttttgtatttctttttgtgctaattttgatagattaaatgtttctaggaatttgcttatctcacctaggttttcaaatttattagcatatacttgttcataacactctatgctttatatctgtgtcatatctgtagctgttccccctttttcattatgtatttgtttattcattttttctccctttatccataatcggccttgttgtaactctgaatatcttacaaatatttttaagtaagcagcttttggaatcaaaagtatgttaattttcactacctagttttttgttctctatttctgtttcattgctttctattcttatctttataactccttttcttcgtatttctttaggtttgctcaacttctctttttccaaatttttgagtagaatttctaggtcctttattttaacttttcttgttctaataaatgtatttgaaattataatattattttatatgtatattttatgtgtaacatttttaacacctggttctaaaagagttaattttctttataactgctgtttatttatttgacacagggtcccactctattgctgaggctggagtgcagtgacgcaatcatgcctcactgcagcctccatcttctggactccagcgatgctcccatccacgactgccttttaaatccatgttactgataaatatatttgttcacttacaattttaagtatattttagttatcaagttctaattttattacagtatggttgcagaatatagtttctttctttctttttctttttttttttttttttttaagacagtgtcttactctgttgcccaggctggagggcagtggcacaatctcagctcactgcaacctctgcctcctgggttcaagcgatcctcccgtctagccttctgactagttgggattacaggtgcaccccatccagctaaattttttgtagagacggggttttgccatgttgcccaggctggtctcaaactcctgggctctagggatctgcccaccttgacctcccaaaatgttgggattacaggcatgagccactgctcctggcctagaatatagatagtttctaagataccgatactctggaatttattggcgttacctttatggaatgatgcatgtcctatttgagtaaatgttctgtgtggcttgaactattatatataatttttggttttctggcaacttttaaaaaatgaattttatgaatcttgtacctcattttatttccttctttgctttcactatcctatggcctggagccaattattttttatccatttatagttggctgataaatatgtgtcctgttaaaccggctctctgaagaaaaacaatgcttctgacttgtagcattgctgatttctatagtataaatacttccatagtggtcaatatcaagttaccaatagttaacaactgtcttcaaaaatcctgaatactttgcagtctgctcttgctagccagtataagacagcgcaccacttttttttttttttaagatattcacgttgtccattagtttccattagtttcactccttggcttcacttacttttcttaaccatattttctctctgacccagtgttgttttcttcttttaaaaattgttttaaattatctctgtaagctgctacaaaccttttattggaatgaagggcattagaacagttatttggccaatacagaaaaatgaagtcttctaattttttttttttttttttttttgagatggaatttctctcttgtcgtccaggtggagtgcaatggcgcaatcttggctcactgccacctttgcctcccgggttcaagcgattctccctgcctcagcctcccgagtagctgggattacaggcaccatgcccagctaatttttgtattttaagtagagatgaggtttcaccatgttggccagactggtcacgaactcctgacctcaggtgaaccacccgccttggcctcccaaagtgctggaattacaggcacgagccaccgcgcctggccgaagtcttccaattttaaaagatctaatcttcattcagttctcaaagtctttgctgtgcccttaaggcatgtcacacgcatgtgcagctcaggggtaacctggtactcctgagggttcagactcagaattagggaatttccgcctgtactctcagtttggagattcccctacacattcctgcccgcaggggccctttttcttcattcctctggccagaaagccggtatttctcttgttaactcagggcttgtgctaccacgcagtgcagctctgcacctgaggcctgacgtcagggcagagctgggaggaaaaaaggggaaaacattgaaaacccactccccaggaggggcccctctcccagttttgaccctcttcacaatccacctgcttttgtttactttttggagtccttgagtacttgctttttgtatactgcccagaatttctacttgtgatcagtgggaaaaatgggctatttaaaatctcaaataagttaaatatcatggctagaaacaactccaggcatttgtaattttagatttttttctttacactccagggggatgtgattgttttagagttttgaattcgtatgtttagcctgagatcctactagtatttctgttgaatatgcctgttgactgcccacttgttagcaaaatggcattgaatgttggaactgtaaactaccttagaaatcattcagcaccatcttttgacagaaaaggatatgagagttcactcctgtcactcaggaagtgcaaggcaaagatagaagcagaattaaatttgttttaatacagttactcagccatctggtaacagtttcctaagtgccaacgaatgtatggggctatttattgcagattttaagatgatatatggggattgagggaatgagaagttttagggagtggtagaggaagggcatataataagactgaatcccagatcccagcctcagaacttattttgtgaccttggtcaagtgatttaatctttccaaacctctatgtgtcctatagaagtaataataatacctatatagggttgggtgttttttttgtttgttttttctttttcttttcttttttttttcttaagatagggtctttctctgtcacccacgctagagtgcagtggcgcaatcacagctcactgtagcctcaaactcccaggcctaagcgatcctcccactcagcctcccaggcagctgggactacaggcatgcaccaccgcacccgactaatttttaaatttttttgtagagatggggttctcactatgttgcccaggctggtcactaactcctgggctcaagcaatcctcccgccttgacctcccaaagtgctgggattacaggtgtgaatacagggggttttttggtttgaattttaagagataaaatttataaaacatttagccaatgccacaaatgtagcttcttttggttattgtcattattctttgaaattcacaagtgccccaaaatatttaagcatttttcatgtattgccctttaatatgaatgaatgcattatgaaaggaattcttttacatgcgagtttgctgatagtcttagctaattctcatgtgtgtaggtgtcttgcctatctgtcagtcttagccttaaaggaaagagtcccatcacctcacttgcggcctcatcatcatggaccgcatgatgatgcggaatgagaatttttattgtttgtactacttcaaaatcattcagtacgtgatcacctgtcatgtatagggctctttatatttctagtttagtcccttttgttttctctaggaaagatgttttagacctgggacaaaagaagaaagagtgtatgctgacatctaggagggaagcacccacctcccctaagctccatctccctgagcactcatttcccaatgaccataccaggttttggccctagagagtttattacaaaataagaaagagaagtctggggaaggttcactcatcatagaattttggcagttcattgcccaagatgactcgatggtccacaccggcagctgtaatagtgaccaggtagatgacacccccgcttgagccatcccggctcatggccagagcaatagctgcagagggtttcaagttggagagagggagagagaggatggcttagcttcaaaaatctttttactccccctccatccatatgcctactaccactttcacctcaaaactcatcttccaggaaggcatatttagtggtgtgctggtaaatcagtttttttacaaaaaggcttccatatgtggcatctgctgatgtccgtggtgtaaatgctcccgctatgatgaattgcaagttacaaatagctaagcagttcacaaatccttgactatttaacagtccgctctcatgagtggtcccaagccagcctcagcacacctcagcacaccactggttctttttttttttttttttctccagacagggtctctctctgtcacctaggctgcagcgcagtggtgcaatcaccgctcactacagccttgatctccccggctcagatgatctttccacctcagcctcctgagtagctgggactacaggtgtgcaccactatgcccagttcatttttttttttacttttttttattgttttttgtggagacagggtttcaccatcttgcctaggctggcctcaaactcctgggctcaagtaatcctcctgcctcagcctcccaaattgttggcattacaggtgtgagccactgtgcttagcacaccactggttctcacagtgactgtgtatcctcatttgatttactcagaacagccctggtttatccgtattgcccaagaaccccattgagctttgcatttgtcctgccccttttcactcttaaaagtgtaccaggcccggcattaacttaaatggccacccctgtatttctcttcctgttcctcataatctacttccttcccatgtttcaaagccctccccaggtacccttccacttggctggttaccgtctgtggtgaagcgcctgcactcctcgggagacatgcctggcttatatgctgcatccacataaccatagataaaggtgctgccggagccaccaatggcaaaaggctgtcgagtcagcattcctcccagggttccatatacctgggaaagggatcctcaggttaaagaatcatcaagcccttccttcccactgagacattaagtggtctctgcaccctgcaatgaagccctggtatctcatatccccaaagtactatgctttcagaggtagtgtccttggaactcattgctagaatgacataggacttccatcttcctctgcaggagagtggggaagcccagaggagagagtgctttgggagaaactcacctgacctccttcacgttggtcccagccagctaccatgagatgtgcagacaagtcctctcgatatttatagctgatatttctcaccacatttgcagcagccaaaacaagtggaggttcctccagttctatcctgagggaaatattaggaataaaggttgatagaattttaagtctcattctcctatactgttaccatcatccctgctaaacgacccctgaaaactgtaactgcaatagctcaaactgcagcctccctcccacatgtacaggggaaccagagtcccacaccaccaactggtaagaagctttcaattgctcactcttttgctcagccccacccacataactttcttttggctgcaaggaccctgctcttatggggaaaagcagataaggttacttccgtcccaacgaccttgatttctcgtatggtaactgcctgatattatggtgggtcacaatatcaccttcttcctgattatttatatcaggatagtgatttacagcttttaaactgtgttcacatatagaatgtggttctcaaaataaccgtctcatgaggtactatattatctccactttacagatgcagaaactgacagattcaagtgccagcaagagccgaaacaagacttttccatttcccagtgtccagctcctggaacagcacactgtacagggattcatgcaggttgggggagctctagtgggtggggagtcagaactccagagcttcatacccatggagctccagctggtaggcggccatgtcggccacggcttgggcatcagcagctgaaccagagagtgcacagtagatgcgctcgtgcagcggggacagcttgtcaaacactcggttcaccaccgcctcgctgtcaggagggagtcaacagtcaccaagttaaaactcaggttttttttttttttttttttttttgagacagtctcactctgtcacccaggctggagtgcagtggatcaatcttgggctcactgcaaacttcgcctccctggttcaagtgattctcctgcctcagcctcccgaatagctgggattacaggcacccaccaccaagcccagctaatgtttgtattttcagtagagacaaggtcccaacatgttggccaggctggtctcaaactcctgacctcaaatatctgcccacctcggcatcccaaagtgctgagattatagatgtgagccactgcacccaaccagaactcaggaatttttgagggtgatcattcaatgtctctcaaatttctttgacaagagaatagcatgaagtttaatgcttggattaaagcaggaggcaaataatcatctcagatattattaatcactgcagatgttaatcaaaattaggcttatttttcaggcttagattttataacaaagcaaaaaatgctaaggtaagaaaaatatgcctcatcaattttctttgctattaacaatcttgagagagttatgttctatggaacataatgtcagtaatattgacctaaccccatatactcattttgcatgtgaggaaattggttaggagtgggagaagagacaaaatagttcaatatatggtaaatgagaaaccaggtatctgcttgacagaatcatctttttgatccctaagcacagatggaaagaagaccctcaaaaatctatctcctgtccccctctcagaccctattcctttactcatccctgtacactactgggacaggtcacatacacattcagaccccagatcctcctccacaaattcagagacccaagcacccaccaaatagcttatcatagtggcttttggggaaggtcaactccattcctccaaggctccagtttgccagtcttttcatgaatgggtaaggaaagtgtgtatttgaggccattagcttctttccaaatgcatacatcttcacttttactcaccctgcagacactcgggaatcagaacccatcacaacgcccccgtcaaactccactgccatgatggtggtctgcagagacacagaatatggaatgtcagggcaagaacagccttgatgccctcatgttagagaagaagaaacattcccagagaggcgaagtgactggctcaaagattacacagtaacaggccagagctgactgtcagtacaggctttttttcccttcatctttccactttctctattgcttcatccggctgcaggggaatgccacagcccagctgtgatacaacacagaaagaactgtgtccctaagttccaacttgcctagtggaatcctctccactgtagagaggtggagatgaggctcctacaggtagaagtgaagcagctccgcaagtgaaaattatctccaacggaagggctcatagtatgtgcagatgtggtgtagacccaacacagagtaattgactatgatcttgggaaacaaggtcagtctatttttttttttttggtccacaatcctccactctcaccccccatttcatcagaagtgagctcttccaatttactgaacattggaaaaaatcgaggagggcagtggttagcatggccaggggcaaggcaggagagaagcagcaaggaacacatacagatggttgaaaataaaagtttcagttatggaatttccgatcaagaggtaaatacatatctcagcagccagggaggtaaatttgtaccaagagataatttgactgagaagtttaagctgacttttccaggtcaagaaaagaatcaagaagaagtgagggaagataaagctacatttattctactattgagttggaaggagccttaaagatcctcggttcaaatgaggaaaccaagtcacagaaaatgcaaacgacttatgcaaagtcacacagagttaatagtagacctgggactaaaattcaggtctaactcttatcccttgtttccacttctacttcctacttgccactgctcatttggcagtgaggggagatttcccaaattataagtggtttcactgtgtctttcttaccaggccgtaagttactctggccccaaaggacgctcctctgagtatgctttccgacggaccgacttatcatgaatagagggtcaaagaacagggttaacttcaagttagaggctattcctctctaacaaagccgcccccaagccacgagtggtggcagtagtccagagcagaagccagccagccagtcttggggctgccatctgccccaggcgcccatcctaagcaaagtccccccagtgggcacatgggagtgggcagggaagacacagggaagggagtaaggcagcatctgggccaaggagaggccttcctgggtcaagctagggaagggcatcactagttaacacagaacgcccattatcagtgcttgggctaagagttgcccagtggcaagtttatcaaaagtctgtgtgatgagttggtccttctcaataagtgcctatatttccttctcccaagtgctgttctacttcacccagggcaccatttcctcatctctttgcaccatccccaaccccctttcttgatttaaccagcccccactgtccgggaccagagtgaaagcgaaagcgctttagagtagcttcccgttgacgcttccagctaagagtcaaagcacccgctttttccaccagcctcgcgtgcctgttcccttcacggacactctagacgacccccctcagaaaagaaatactctatgctcattgcgggttgcaagcgctggctgctacaggcgacctccctgcgctcccgttggtctctgcattcacttctccgcgcgcgcttccagggtcccctggccgctgcatctcctccacccctctgccaaccctcaagcccagacccattaccccggtgtggacttctcccgcccggggtaagtccccggttggtgctcccgcccgcagcatccctgcaaggcaccgctctcctcgccgcctggggcactggtttccaacctgggacagcgcacaacgcgcagccgacagccccgccccttcgcggcgccgccaggaggcgcctgggtgctgcggggctgctttgcgcgcggcgctaacgtgtgtagggcagatctgccccgagacaagtgacgaggcagccccgccctgaggctggggtgggaaaactggtgcaagtggaaaggcaggaggcagggagaggcgagaagggtgtgcgtgatggagaaaattgggcaccagggctgctcccgagattctcagatctgatttccacgcttgctaccaaaatagtctgggcaggccacttttggaagtaggcgttatctagtgagcaggcggccgctttcgatttcgctttcccctaaatggctgagcttctcgccagcgcaggatcagcctgttcctgggactttccgagagccccgccctcgttccctcccccagccgccagtaggggaggactcggcggtacccggagcttcaggccccaccggggcgcggagagtcccaggcccggccgggaccgggacggcgtccgagtgccaatggctagctctaggtgtcccgctccccgcgggtgccgctgcctccccggagcttctctcgcatggctggggacagtactgctacttctcgccgactgggtgctgctccggaccgcgctgccccgcatattctccctgctggtgcccaccgcgctgccactgctccgggtctgggcggtgggcctgagccgctgggccgtgctctggctgggggcctgcggggtcctcagggcaacggttggctccaagagcgaaaacgcaggtgcccagggctggctggctgctttgaagccattagctgcggcactgggcttggccctgccgggacttgccttgttccgagagctgatctcatggggagcccccgggtccgcggatagcaccaggctactgcactggggaagtcaccctaccgccttcgttgtcagttatgcagcggcactgcccgcagcagccctgtggcacaaactcgggagcctctgggtgcccggcggtcagggcggctctggaaaccctgtgcgtcggcttctaggctgcctgggctcggagacgcgccgcctctcgctgttcctggtcctggtggtcctctcctctcttggtaaggggaacgcagggcaagaggggaggacacaaggggactgggacaggaatcaaaggtaattgtcagtaaggtagagtagcgtgggttctgggaaatgtggagcgggagaaggactcctagcgtgggtcttggaacaccacttcggtgtagaagaaacggcactggactggcgggggccagaggttctgggctccattgctgaccgggtcttgattctttgggccacgccggaagcggggaaatcctttgctctggggccgaagggcggggcatcctcatctctaacaggaggcttttctacttcatgatctccagccttcctaataaaatcctgaaagttctggtagagcaaccacagggtagtgagttccagggcagcctatttaggttcgggattgagacgtcagtgtttcctttctgctgatgccctccaggataatggtgagggggaggaggcgtggtggggccagtctgactggaactgacctacttagacttaatatttgtgcgtgacctctcttctctttctccaggggagatggccattccattctttacgggccgcctcactgactggattctacaagatggctcagccgataccttcactcgaaacttaactctcatgtccattctcaccatagccaggtctgggggctgaaaatggggcaccctgcaaatgagggagttggaagttggggctgctgtccgaaatgcacttatatggggatacctgggaccttcagtctgttccctgaacacaccctgatcccctttttttccgggttctttatagtgcagtgctggagttcgtgggtgacgggatctataacaacaccatgggccacgtgcacagccacttgcagggagaggtgtttggggctgtcctgcgccaggagacggagtttttccaacagaaccagacaggtttctcctgaaactctttcattatacgccatgtactgttcatatcctcatacatctgctttgatctcccccctccccgctctctctctctcacacacacatacacacattgttccttctcattcttgatataccctctccctgtctctctctctctgtctctgtctctctctctctctctctcacacacacacacacacaattgtttttctcattcttgatatacctcaggagcaaaatattgtcctccttaccttaagaaaaacctagagttttcatctagcattttcttataaatctattcctatgtatccttagatagaaaccatagaatttcaaacctggaaattttgagctcatagagaccaactgcctcatctgacagagaaggaaactgaggccaagaccctaaatgctgaaactgcacagttacatatggctagagacacacttggggttagaaccctggtctcttgagtgctccacagacttcggcatgctttctagcagcactagaagctgtacagttacatatggctagagatagacctggggttagaaccctagtcccagtgagtgctccacagactttggcatgcttcctagcagcaccctcctcctccatctctgttatgtgaccagtttaagctcttcctgcctgtgtgtatagcatgggacatacaggttctctagggaacagaaagctttcaggaaaatggaaattcacatgtgcattaatgactttataattaaaatgaaggtcaggcctttcctctttaacactcatcttccctgcactgagatttgcagacctctggagaaccctaaccttgtttcctgcagcctccttagaaccccatgttgacacccctgaccctggcatcctggctcattgttagttcgtctcatcacttggaacctgtctgattcacctcactctcttctccccaaccctgcaggtaacatcatgtctcgggtaacagaggacacgtccaccctgagtgattctctgagtgagaatctgagcttatttctgtggtacctggtgcgaggcctatgtctcttggggatcatgctctggggatcagtgtccctcaccatggtcaccctgatcaccctgcctctgcttttccttctgcccaagaaggtgggaaaatggtaccaggtatgttcatggagttggcccgctctacacagaccctcatctcccagacttggcagactcagttcctctcacattgctttcagtccagctttcctggcacccttactgattctccatcttcatggaacaccctgtccctgtggtccatgttcccaggttgctcaacattaacctccatactctctgggtcttcttttctagcttctccccacaatctgtctttaagaatttgatccccaacccgttctgagtcattttcctcttcctcgtatttctttagcatccaaggggcatagctgtgtctctttctcttttctccttttcctctgtctcttctcacctttaatttccaaataggtaactcaggtattagtgtccctgatggtttgccaacccgtgtgacatctcttgtccatgtatccacagttgctggaagtgcaggtgcgggaatctctggcaaagtccagccaggtggccattgaggctctgtcggccatgcctacagttcgaagctttgccaacgaggagggcgaagcccagaagtttagggaaaagctgcaagaaataaagacactcaaccagaaggaggctgtggcctatgcagtcaactcctggaccactagtgtgagcacctgaagatgaatacccattcccttgtccttaagatgccgtgactccattcccattcctatgaccctgctcccactccttctttactgggaaatggttggttcagtattttcgtcctagcaacctgaggctcaatgactctactcagtgtccctagccccctccctctctttaaagatgctaggtggcttcctttcagtatggtacataaaatccacccaaccatgtggattggagagatgcgtgtcttccagtcctagggccttcctttgcctctcaggggaagtgcagggcgccataaattcttgcacctgggactgcttcatgctggtaccttgtagatttgttagtgagagtgatgggaatagtggaagccagggatgagggacatctgtgatgcactggaaagagagctacgccagtgatccgaagatcctggcttgatgatgcaatttacttgtcttgtgatcatgacaacaaatttaccttctctgagactgtttcctctttatttatttatttgtttgtttgtttgtttatttttacttattattattatttttgagctggagtctcgctttgtcgcccaggctggagtgcagtggcgcgatctgggctcactgcaagctccgcctcccgggttcacgccgttctcccgcctcagcctcctgagtagctgggactacaggcacccgccaccacgcccggctaattttttttttttttttgtatttttagtagagacgaggtttctccgtgttagccaggatggtctcaatctcctgaccttgtgatccgcccacttcggcctcccaaagtgctggaattgcaggcatgagccactgcgcccgactggttgtttcctcatttttcaaaaatggagtgatataaccttctttataaggctcttcatgtattagctgacatcacatgaatgaaagccttttgtgaagagtaaaatgctccccagacaaggtgatagtggtgatggtggtgaagataactgtgacttgcatgatgtgcattgagtcagactccatggggtctctggttcattctcctgtctgcctattgagcctgccgatgtcacttaggagacagggacttgatatttccttcaggttaatgactgtggttctttgtgtcccctccagatttctctacctcagtccctttttttgtggtctctttatagatttcaggtatgctgctgaaagtgggaatcctctacattggtgggcagctggtgaccagtggggctgtaagcagtgggaaccttgtcacatttgttctctaccagatgcagttcacccaggctgtggaggtgaggtccctccaccttcactccccagtgtgattccttcctctggcccagcaccatctgtgtgatgtccttccattctttacccttcttgcttcacataatgctggcaagcagactacctcactttcactattcttacctccctctaggtactgctctccatctaccccagagtacagaaggctgtgggctcctcagagaaaatatttgagtacctggaccgcacccctcgctgcccacccagtggtctgttgactcccttacacttggagggccttgtccagttccaagatgtctcctttgcctacccaaaccgcccagatgtcttagtgctacaggtacaacctaccactccctgtattccactggccccaactgcaattctgccatcctaaattttcttcctgccttcagcctgcttactgccaagcatatatcctccctaaccctttaaaggcaatggtaggcatcatctgttccataaatcttccccaaactcaagaacccagtttgggcttccaaagagaatgagagaagaggtttcgaagagagtgctctcacgttccaaggaattgctgcagcaaaatctgtgtcttcggtcttccatctttccttttcctttgtaatttggaatgtgatttttccctttcctggtggtatctgacatcaagtgtgtggcatagtggtgctgggtctctgcccttgtctttgccgcttcttctatctctactccttggggaggcatcacccagaaatctgtgcatgtgggagggtaggagtttctatatttccctgtttttcttctggggtaagacatcatgctatgtaacaaggcaatgacactctcaaggttagaggccttggtagcctcttatcgtgtgcttctctggcctctaggggctgacattcaccctacgccctggcgaggtgacggcgctggtgggacccaatgggtctgggaagagcacagtggctgccctgctgcagaatctgtaccagcccaccgggggacagctgctgttggatgggaagccccttccccaatatgagcaccgctacctgcacaggcaggtatggaagcaggtggcttgaaggagggcagggagcatcaaatacgaagagcattcttactgagcactctgaaagaggggttagggaatgataagagaccttgggtggagatggtggtgtagtcaggagggaggtagtatgattttgtgacatgttctcaataaagattttgagtcttcgatctctagataaccatactcccatgtgccttgttctatgactcttcatcatatttcatctcaggtggctgcagtgggacaagagccacaggtatttggaagaagtcttcaagaaaatattgcctatggcctgacccagaagccaactatggaggaaatcacagctgctgcagtaaagtctggggcccatagtttcatctctggactccctcagggctatgacacaggtactctctccactcatctcaccacccagccatctttacctttgctgaaaccccagtagtcttgcctttatccttcagttcctccttactcatggacatcaatttgaagttgtaagatcatgctcctatggcttcttcatcctgacatcctcaggattctgttcatcttcccagaatctcccctatccagctacaaccgtcagatcttggtgtgtgtgagtgcgtgaatgcatgagtgtgtctgtgtgcatgtacatgcgtgcacacatgtggctataccgttctcatcttggccctttgctctgcagaggtagacgaggctgggagccagctgtcagggggtcagcgacaggcagtggcgttggcccgagcattgatccggaaaccgtgtgtacttatcctggatgatgccaccagtgccctggatgcaaacagccagttacaggtgaggcagtcatcttcttaatggctatatcccacccaatcttgcttcttttatacatcttctgttagttttactaacatcataattatacaaaccagtccttgcagttctcagttcccaaatccagttccattggatgcctccccaaggagtagagatagaagacgaggcaaagacacctagaatcagttaaaagagactatctacaaactacagactgaatttctttctttctttccttttttttttttaagacagtgtctcactcagttgcccaggctggagcgcagtggcacaatcttggctcactgcagcttcaacctgctgggctcaagcgattctcccctcagcctcccgagtagctgggactacaggtgtacaccactatgcctggttgacttttatatttttagtagagatgggtttcaccatgttgcccaggctggccttgaattcctgagctcaggtaatctgcccccctcagcctcccaaagggctggggttataggtgtgagccactgcgcccagtcctatagactgaatttctaaagcgaaacataaggaaaagaccatcctcataatatcgtttatttaaaaaaattattttttgtacagacagcgtcccgctatgttgcccaggctggccttgaactcctgggcccaagtgatcctccctccttgacctcccaaagtgctaggattataggcatgagccaccgggcccagcccatcctaatcatattaatattaattaagctagtctgtttacatgcactgtcactcatttattcattaggaatccttctgagctaggcatttatcatcattctacagatgacaaaatggaggttaaaagaggttgaataagctgctcatatagaggtcatatagcttttgagtggcgcagccttgacccaaattcaggtctgcctgacttgaatgctcatctctttactactaagttatatttccttaaaatcgaatataaaaatgccaagtccatgggtagagaagaggactattcaatagtctttattcttctgtcacgtgtttcaccctagggttctcatttttatcctacttttgcacccttcatgtaaaacagtccttaatgaaacaaagggtttgcggagaagtactcagaatgggaaacgttggtgtccttggggttgttagcagagccagcagtgatcctgtgaggtcagtcccagccctggaaacacaggtgtctccctgggctgagggtagtccccggctctgacggtccgatgtctttcctcaggtggagcagctcctgtacgaaagccctgagcggtactcccgctcagtgcttctcatcacccagcacctcagcctggtggagcaggctgaccacatcctctttctggaaggaggcgctatccgggaggggggaacccaccagcagctcatggagaaaaaggggtgctactgggccatggtgcaggctcctgcagatgctccagaatgaaagccttctcagacctgcgcactccatctccctcccttttcttctctctgtggtggagaaccacagctgcagagtaggcagctgcctccaggatgagttacttgaaatttgccttgagtgtgttacctcctttccaagctcctcgtgataatgcagacttcctggagtacaaacacaggatttgtaattccttactgtaacggagtttagagccagggctgatgctttggtgtggccagcactctgaaactgagaaatgttcagaatgtacggaaagatgatcagctattttcaacataactgaaggcatatgctggcccataaacaccctgtaggttcttgatatttataataaaattggtgttttgtactgtggtttcttatgtttccggcacaccaaacggcccactgccttttgcagcgcacttttcagctgcggatgtctcctcttttatcatcctcaatgttttaccccctaactgcatcaccttttcccttaagctttttaattcctatgaggccccttccacttcccctatccccttaggcccacccccaagaatgtgcaagaccccagccacagggcccatcagggcactagcggccgcagctcagagccgtggcctctccgaagtggcagatggggcgggcgcggccagagcaagtgccaggcgggaacagagggactgggcgcgcctcacaactcaccacctcgcccgctggtccttcctggctcgcctggctctgaagctgcacctggaggggaaacctcagaacagtaggcgggattgcctagtaaatatctcccattcagggaggcccaggtcgtgtgacgtcgacagttgctgggtagatgaggccaacacaggttgcaagaagaggcggggtttagaggcgtgaaactccgcagtgctcagccaagcagggagcaacgctaggaagggcgggcagaaagggcacgctcttgtgggtgactacaggttaggagaccgttgaacctggaggggccctaggatggaccccgtggaaagattcagagactgcgccctctccctggcgccgccttcccctacacgcggcgggtatattctgttgcagttggcccaggacctgtttccaagactctgccccctcgcacttccgtccctcctggttttgtaaagtgatgctcataggaacccccaccccgcgtgacactactcccagctcctggctgacttctagtcttctggttgaagctgcgcctttagatgacacgaccctacccacccctgtttccagcggatgcccgggcctggaggtacctcttactgtaacccatcgccaagtgggcttttgaaggcgcctgttcctttctcgctttcttcggaagacccttgacccatcattcccccgacccccataacgggagagcagagaagccggtccccagtgtgatggtcctggtccaggcactaactgtccttttctcggaaaaggcagggggatgtggaaaagagtcttgttccctccccttcgatctgtggctttcgctttcacttcctcctccgagagcggacagatctctgggtgctgggcggtcatggcgctactagatgtatgcggagccccccgagggcagcggccggaatcggctctcccggttgcgggaagcgggcgtcgctcggacccaggacactacagtttctctatgcgatctccagagctcgctttaccccggggaatgcaggtcggggcagtagggaagcccctagggatgcagggaggcgggcgctgaggagtggagggtcgcctgagaggaggaggcgagagcgggagcgcggggtacagggtcgggggtagccttcagtcccggagagcgccagacccaaagaagaggccacatggggatggggcctgagaggaggaagtgcaagttaggacaaagagttacaggtgaggtgggggctcccaaaggaagacaagagaactttcctgcccttgtccacacacaaatggtggagcctttttcatggggttatcacatgatataggaggtgtgtggtgtcttgggaaacctatgaaatttgcctgctggcctcctctcagcaactcactgttgcgcgacttagaacaagtcacttagtctaggtcccaagcccctcttctgtaaagtgaggatactgttactaaacgtgttttgtgagggttgaatgctttatgcatggaagaaaccctttaagtcactctcaaaattttttagtaatggtaacatgtgcttgctttcatttctgttgtgctggaaaatggaaaaggttgatactggcatgcctcttcttttccttctcccaagccatttccttctagagattggttattaactgtttcatttattgatggttagatcatttctgcatatctcctcaccctcatactccctaaaaccttttcctggagcctcttactacagaatttttcattgcctttctcaacctcttttctcttatcagcccacagaattcttccagtccctgggtggggacggagaaaggaacgttcagattgagatggcccatggcaccaccacgctcgccttcaagttccagcatggagtgattgcagcagtggattctcgggcctcagctgggtcctacattagtgagtgtatacgctccagcaggcagaatctggggagctgggctctcctttccacaggaggccaactctgcaacaaagtggaagtggatattgatttaggacacactgggggatctatggggtcatcccttctctcccaaagctccatcttcttccaggtgccttacgggtgaacaaggtgattgagattaacccttacctgcttggcaccatgtctggctgtgcagcagactgtcagtactgggagcgcctgctggccaaggaatgcaggtaagcgaggcctctcatcttcctttcttagcctagtggttaatccctggatctctcagatcattgctccttactcttgtcctatgtggtccatcttagtgctaatagtatatttcacaaaacagctttttggtgataagacccttctcccaaatctcagcctgtgctccactcataagccagatagtacgtcaggtatttagcactgacacatccaccctggcgggacagtatcatttactaggctgcctttgtatgtttcagatactttaaattccaaatctttctctgatctttagatcctacaaaataattcctttccaatgcttatctctttaatcatttcctgccccatcaagttggaaagagctaacctctctttcctcactccaccttgtcctcacccaggctgtactatctgcgaaatggagaacgtatttcagtgtcggcagcctccaagctgctgtccaacatgatgtgccagtaccggggcatgggcctctctatgggcagtatgatctgtggctgggataagaaggtgggtgctctccattcttcatgttcccccaccatgttccctatggatgacagatctgtttcccatcatatactcctactccctccctgacaagatgcatggcatatagagtgcttggttatagaactgtttcagtatatccatggactatttattggcccagatatgaatcattgcatgtgttttgtaagcttgtcccttttgttaaacagttgatttcaagtttgtttttcctttttcatttctaaagttcgatgactttaccaaagtggtttcctaattccaatgttcttgtggtaatattaattcttttgttcactttttatgtctcatatttgaacccccatgttaccaacatcttcctctccaatttcagcctgaaatctttcatcttatagggtcctggactctactacgtggatgaacatgggactcggctctcaggaaatatgttctccacgggtagtgggaacacttatgcctacggggtcatggacagtggctatcggcctaatcttagccctgaagaggcctatgaccttggccgcagggctattgcttatgccactcacagagacagctattctggaggcgttgtcaatagtaagagaccaatgctcccaccaccatgcctgggaggagtcggcgggtggtggggggggtgatttaagattgagaaaccagcctggccaacatggcgaaaccccgtctctactaaaactacaaaaattagccggacgtggtgacgggtgcctgtagtcccagctacttgggaggctgaggcaggagaatcacttgaacctgggaggtggagcttgcagtgagccaagatggcgccactgcattccagtctgggccacagagtgagactccttctcaaaagaaaaaaaagaaaatgattgagagactcaaaggagggagagtagtagggaggaaattttcagagtcagaagaagggcattaaaggcccagtcatatggttttaagcttgcgcatgtgtcttgttgctgccttcaacataacatcagtgacaggaacttgctgaggtgaaaggtgactccatgttcttttctcatttgtccacagtgtaccacatgaaggaagatggttgggtgaaagtagaaagtacagatgtcagtgacctgctgcaccagtaccgggaagccaatcaataatggtggtggtggcagctgggcaggtctcctctgggaggtcttggccgactcagggacctaagccacgttaagtccaaggagaagaagaggcctagcctgagccaaagagagagtacgggctcagcagccagaggaggccggtgaagtgcatcttctgcgtgttctctatttgaacaagcatttcccccagggaagtttctgggtgccccactaagtagaataaagaaaaacggttataaatacctctgtcttgtggctgaatggggttgggcctgtggttgttgggtggggcagaaagtaaagagacgctttttctggagaaggggctcagacccctatctaagaaatgtggcctcaccacatagttcttcctggggtttccttccacactcatctctccaagacctcaggaaggctgctcattgctgtccatggacacttgtttgcaatttcacataggttagggtcctttccatagagaggcacctggggactcctgtgtgttccattgttaatggtttgaggaacagggagtagggcacctaggataactgtttttgactttatagagtaggatgaaaaagcttccacttcactttaatatggtaatcatataaacaccataccatttatcccaaataacactttggagatattggatattgaatataaagacagacattaagggtctaatttcatgatgtgtcatgctgaattgcaagatggcaggactataattttagaggaagaagagatcaggaggactcccctaagtgaggagtgtggggaaaatgtaaaagatccaggttagaagaaagagacacacatcatgagattttcggaatcatgctggaactatggaccatgtcactttccagaaaataaaggaaacaaatgcttgaaagtaggagcatgagcttgagcatggagcttttttcattagagagagattcttaaaatgccagaatgaatagagttgtaaaactttagcgagcccctacttaaaatccctcctccccaccaccactattttaaactttaagtgactccttggtagtcacacaggtaacatttcaaaatggtgatctggaatccaagcgacccttcctttggggaatttgtttgtttgtttgtttttagtttgggaggtggtttcaatctgaagagtcctttctggaataaacgaatctttctgttgcataggaaggctctgggtcaggaaggatatttaaaaacctaattactgttctaaacagtgttaaaatagaacaagaaccaaagctcagtacggggcatttccctcataggctgaaggtgcgcccaacataatttggagtacagactcagaggcacctgaacacgcgccagctcaaggtgctccggctgagaaggacggatgaagatgaacgctcagggcctactaaattcaaagtctgtacgtgaaaatcccctttggcctggtgagattggttggaaccttctatttaggagagcccggctcgctcgcctaaaactggagcttgcatggaagagggcacttttttttttttagacgaagtctcactcttgtcgcccaggctggagtgcaatgacccgatctcggctcactgaaacctctgcctcctgagttcaagcgattcccctgcctcagcctcccgagtagctgggattacaggcgtccgccaccacgccctggctaatttttgtatttttagtagagacagggtttcaccatgttggccaggctggtctcgaacccctgacctcaggcgatccgcccgcctcggcctcccaaagtgctgtgattacaggcgtgagccaccgcgccggaccagaaagaaggcacttcttaatagtaggctcagagcttgaagtagtaactttgagaaaattcagtgattctccaattacaaagcattctccaattacaaagcaaggacaacagataaagttgcccttgagacaactgtattttacttaatgataaagaaacatttttgcagttttatatcccagagtaaccgccactaaaggcgagtgagactcattgcaggcctgtacagtgcgaaccagagttcgggctccagttccgctgtctgcgggtctcgcgcgccccctcccggcggcccagcccagaatgaaggccttggctggggaagcgaaagcgaaagctgcccgagccctgacgcccgccctggccgagcgtagctggcggaccagagccggtagcgaggttgggagagacggagcggacctcagcgctgaagcagaagtccccggagctgcggtctccccgccgcggctggtgagttggtgcggaggggaacctggagcgccaacagggacgcagcccaagtgactacccactccacgctcctgcttcccagtccctctgcacccggcgataggagggagcggagcccggaccacttagctcgccgcggcaggcgggggtgggggtgggggtccggggattttttttttttttttttttaagcacgaggctcctgatggtcatgcttccagctccccagaaggccgaaagctgtctgtcgtaggaggggtgtacggatgagcaccggttactcaggagagctctcagggttgaataggataaaatgagaagccgatggacgggttaggcggagccgggcgggtaggagggcagggacaaggattgggactccacccccatgatttctcatctcgtatccgttgacagagccatgcggctccctgacctgagaccctggacctccctgctgctggtggacgcggctttactgtggctgcttcagggccctctggggactttgcttcctcaagggctgccaggactatggctggaggggaccctgcggctgggagggctgtgggggctgctaaagctaagagggctgctgggatttgtggggacactgctgctcccgctctgtctggccacccccctgactgtctccctgagagccctggtcgcgggggcctcacgtgctcccccagccagagtcgcttcagccccttggagctggctgctggtggggtacggggctgcggggctcagctggtcactgtgggctgttctgagccctcctggagcccaggagaaggagcaggaccaggtgaacaacaaagtcttgatgtggaggctgctgaagctctccaggccggacctgcctctcctcgttgccgccttcttcttccttgtccttgctgttttgggtgagtcaggagaggacgttgtgagttggaggtggtaaaagggcctgggcaccagcacattcttgtgttatttttcatgcctctttcaggtgagacattaatccctcactattctggtcgtgtgattgacatcctgggaggtgattttgacccccatgcctttgccagtgccatcttcttcatgtgcctcttctcctttggcaggtaggtggtgggcagctgggtccatttgctagccccaaatctttataggggtcttcacttccctaactccatttctaggccctttcaggcgcaaaacacaaaaatacttaaactaaaatatggtgaatgtagtcaccattctgtttcatctatccattcatttcttccttcgttcatattcatccaatatcttcaaagtttatctgatcttattataggaacaagttatgagtgaaggtagtacaaaaggaatttaagtctcagatggaatgtctctcagttgtctctcaacattcctaggtccatgaaattccatttctttctgcctcctacctcctacccctaagtctgtctccaaagtatctctccagggtcactctctcaggatgggtatgcttctccctctcactcttctttcccagctcatcttgctaatccctgaagatcttactctgaggcttatcacctttctttccagaatcattactcttttcccttcacttgctttcctttctctttctagacatactcaaacaaacaaactgtttgataaggctgggactgggatgaggtgagcgaggcacctggggtgcaaagtttaaggaggtgtgcactcaccttacccaaatcccagccggcctgattgtctctatttttatggtcatacttaatttagagtaccctcgaaaaccatttcattgtgccttcattccatcctggctgctttctgctgaaactacagtcgtgcactgcataacgatgtttaggtcaatgatgggccacatataagatggtggacccacaagattataataccatatttttactgtaccttttctatgtttagatacacaaatacttacttctgtgttacagtcgcccacagtgttaggtgcagtcatatgttgtacagatttgtagcctaggagcaataggctaaactacatggcctaggtgtgcagtaggctatgacatctaggtttgtgtaagtacactctatgatgttcatacaacgatgaaaccatctaacgacacatttctcagaacacatccctgtcattaaagtacaaaccctcattatatcatgtctgactattccaaacgcctcttcaatatggtaactaaatttgtattagaaacatatattttgtaaaatacatgcttttatgctttatattttttcctctaagtgttactgtagcatgtagttggtctaagagggattttccaactcgaaggatgacagatgggaatcacatgactctggggctccagagaattgtgggggcagggaatttattattgcagttcccatgatgaagtatctatgatgacagagaagggctttgggtatggggcaggaaggagaccaaggcggaggagacgcacagagggacaagcctgagggacgctgggacagaagcaagcactgggatacttgttttcacaatatcttttcccttctattgtagttttctattgtgtctagtacagagtgcactccataaatacttgtaaatttgtacatgttatgattttgttctcacatctagctcaccatgtctcctctttcttcttcctctgtgtattccttacctcttctctctctgtgtgtctgtctctcatttctttctcttttgcccctcctggcatgctttcccctgactttgcgcttctctgcactcctggcttgctcctctgtttcacccgctggcttgctccttctctgcatctccctcccctcttattctcctaccccacagctcactgtctgcaggctgccgaggaggctgcttcacctacaccatgtctcgaatcaacttgcggatccgggagcagcttttctcctccctgctgcgccaggacctcggtttcttccaggagactaagacaggtggggcctggagtccaggtctgagattcccatggacatcccttgcccctcagtgaccttccacccacagcctctcctcctgccttcacccgtatgccaggacctggggatgcttttctcttgtttgggacagggtggagaagcagcctccactgtccctctgcaagtgaaggaggatgttcagaggagggggctgtgtcagagggaacggtcaggagggagtttctgggggccctgcagtacacatggtttcctttttcctcacctgctctgtccttcttaggggagctgaactcacggctgagctcggataccaccctgatgagtaactggcttcctttaaatgccaatgtgctcttgcgaagcctggtgaaagtggtggggctgtatggcttcatgctcagcatatcgcctcgactcaccctcctttctctgctgcacatgcccttcacaatagcagcggagaaggtgtacaacacccgccatcaggtgagcgtgcatgtaagggaaccccaaagggagaataaaactgacaggtgaggaggcttccacatttgtggctagaggatcccctagagagagatgttctcttctcagccattaggggagaaggtatattgtagtatatactacattttgtttgtccagccatccaacaatggatatttgacttcagaagattcatgattctccagaactgtaaacaaaaatgtaaagtgtatgtgaaggtatgggggagggaataggaaggggagatgataggcgatgataacttttcattagcttctcaaaggagtctgtacatcccccgcccccactgcgaagattaaaaatggtttcttagaggcttttaggcagggagattttccctttaaaatcagcagaagaagtctggatgcagcatagggaaaggaggcgtcatcaggaagtcctaagtctgaatgtcagctccaccttctctttttctcttatattgtggtaaaacatacataacataaaatttaccatttcaaccatttgaagtgtacagttcagtgacatttaggaaacccacattgttattgggtagccatcatcaccatccatctccagaacttttttcatcttcctaaaatgaaactctgtacccactaaatagtaactgcctactacccccaacccctggccgctggcaacctccattgtaccttctgtctccatgaattgtgatgactcccggtgcggtacgtaagtggaaccatacagtatttgtctttttgtgactggcatattttacttagcgtaatgtcttcaggcctcatccatattgtagcatgtgttagaatttcctcccttttaaggctgaataatattctgttgtgtgcatatatcacattttgattatccattcatctgtcaatggacatttgcgttgtttccaccttttggctgttgtgaattatgctgctgtggacatgagtgtacacctgtttgaaaccctgcttttggttcttttgggtatatacttagaagtggagctgctggatcatatggcaattctatttaacaatttttgaggaaccatgtattagtccatttttacgctgctgataaagacatacccaagattgggcaatttacaaaagaaagaggtttattggacttacagttccatgtggctgggaagacctcaaatcatggcggaaggtgaaagacacatttcacatggcagcagacaagagaaaagacagcttgtgcaggggaattcccctttttaaaaccattatatctcgtgagacttattcaatatcacaagaacagcatgggaaagacttgccctcatgattcaattacctcctacccagtccctcccacaacacatgggaattcaagatcagatatgggtagggacacagccagatcgtatcaaaccaccatacagttttccatagcggcagcaccattttaaattcccaccagcagtgcataaggtttccaatttctccacatcctcatcaacaccactttctgttgtctttttttttaatagccattctaatggtgattaggtgattaggattatctcattgtggttttgatttgcatttccctaatgattagtaaatattgagcatcttttcgtgtgattttggccacttatgtttctttcttgaaagaatgtctgcaagttctttgcccattttctgatttttttttaagttgtgggagttcactatatgttttgcctattaatttcctatcagatatatgattcacaaatattttcttgtatttcatggttgctttttcactctgttgctagagttctttgatgcacaaacgttttaaattctgatgaagtctgatttatctattttttgttgcctgtgcgtttggtgttatatccaagaaatcactgccaaatctagtggcatgaggcttttcttctacattttcctaggagttttatagtgttagctcttatgtttaggcctctgatccatttggaattacatctccacctttcttaactatctgtggctccttgggaaaactacccttctttcctgattcagacactggggatgggaaaattacctcaaatgaaggttaaaaaaattgcatgtatctcctatactacctaacactgagagctcaataatattttgttcccttgctccttcactcttattccttctggaaagaagagtaaggaagagggagagaaacagtttggtatttttaggtagactagggagcatctcactggctggagtaagatgtgggggcctgctgtctttgcacatcagccctggtgtttgctggccctcttttccaggaagtgcttcgggagatccaggatgcagtggccagggcggggcaggtggtgcgggaagccgttggagggctgcagaccgttcgcagttttggggccgaggagcatgaagtctgtcgctataaagaggcccttgaacaatgtcggcagctgtattggcggagagacctggaacgcgccttgtacctgctcgtaaggagggtaagataccagagtggttgtgaaaggagcccaggaaagggggagggcaagggaagaggaaactacagctggttctagaggcctttgcagctcagtctcatagaggcagagagggggaaagaatgggaagattcccagcctcatctctttcttctcctcttccaggtgctgcacttgggggtgcagatgctgatgctgagctgtgggctgcagcagatgcaggatggggagctcacccagggcagcctgctttcctttatgatctaccaggagagcgtggggagctatgtgcaggtgagcgagaagccaagcctgctctccttttttccctctctttttctttgtggactcctgggccttgggctttatttgttctttttaacaatacaatacaaaaccaaaacccgcaagtaattttgctatggagaattttaaacatatgccaaaaatgagacaaaataatattacaaactcacatgtatacatcctgtgctttaacaatgatcaactcatgcccaatcttgttggatctgtatccccagccacttccccccacccatattattctgaagcaaatccaagatattgtatactttcatctgtaaatatttcagtatgtttcttaaaaatacaaacatctttaaaagtgtataacaacaaagccattatcacaccaaaaaattaacagtagttcttaaaatttatcaaatagtcaattgtcaaatttccacttgtggtatccatgtagtatatgtgtatgagtgtgtttattatactttgcttaaatcaggatccagaaatggtccacatattgtgactggttgatacatcttttaagtctgtctgtctatctatctatccatccatctatccatccatccacccatcaatccatgtatctgtctaaaagtttcccttgcacagtttatttgttgaagaaataggttgtttgtcctgtggagtttcttagggtctggattttgttgactgaatccctgtggtattatatgctcttctgcctctgtacttcctgtctattgatagataaacctagaagcttgtgagattgaggggttttttttggtctttttccagcaacagtactttttaggtggtgatgcattcttcctccaagaggcacacaatgtctggttctctatttgtggcaacatcagccactgatgagcagtacctacatccatgacagaattagggctgcaaaagggagatactctatcattcttcatgtattagctgaagtagtctatgaagggagacttcccctcatctaccatttcattacccggtggtacagtttgatgaggaaaggcagagtgagcatttagatctcttcctacatttaccagttctcaaaaacagctacttcatccagggctttatttaaacattttcctagacacttgataaacatcttttttgtgtagagaactgcgctgggcactctgacggctacaaaggtgagttgggcacagtgcctgcatttaaggagctccccgtctaatcaagcaagacagaactgggcacaagtaataggaagcagtaactgaaaagatctggggctagaggcaatgctgtatggtaggagaagggactgtatatcctttatattgcaaattggaacactggggtattggtgccacttttaaattccgtccaaattgtacatttaaaagtggagaatctcttttgagtatggaggaggagcagtgcagttgtgagtggagtgtgtgaggagttgggagggtggtttctggtagaagtgtgtttaattagccggctctcccattcctgttttccagaccctggtatacatatatggggatatgctcagcaacgtgggagctgcagagaaggttttctcctacatggaccgacagccaaatctgccttcacctggcacgcttgcccccaccactctgcagggggttgtgaaattccaagacgtctcctttgcatatcccaatcgccctgacaggcctgtgctcaaggtgcctgaaagagggaggaaacctggacccttgctctctgctgctaatgcataattggacatcacagcctatagttcatttgcctctgagaacctggtcttgcctctgctaagaagagaaatggagggattttgagggagaaggggcaggcccttaactctttttctggttttctaggggctgacgtttaccctacgtcctggtgaggtgacggcgctggtgggacccaatgggtctgggaagagcacagtggctgccctgctgcagaatctgtaccagcccacagggggacaggtgctgctggatgaaaagcccatctcacagtatgaacactgctacctgcacagccaggtgggtgaggagggagaagacaggggacaggagaggggagcatgtacagagagaggatgggagatccacgggaaggcgcaccaggtgttcattctgagggaggtaggtggggaggacaaaagggcccctgccttgggggtttacacatagtcctctgcccctgtccctgctgcacaggtggtttcagttgggcaggagcctgtgctgttctccggttctgtgaggaacaacattgcttatgggctgcagagctgcgaagatgataaggtgatggcggctgcccaggctgcccacgcagatgacttcatccaggaaatggagcatggaatatacacaggtatcttctacaaattgtaagcttgctccttcagtaaaaaagagaaaatcagacttactcttagtggtgaaggtcgtgtccctgtagcttgatgtttgctgttcctctgccctttcctccattcctacgtctccttccccacacactgaattcttcagcctccctcttgatcaagagtctttgtttgcagagagcaatgcagcagtggtgctccctccatgggcagccccgtcaggtccccaccccatggccctcctcccactgggccctccccgcactgggccctcccacctcccgaggtcctactggaagtacctgctgtgcacttgtccctccttgtgtgttgtctgtgtcacttgtatctgaggaagggaatttctctgatttcctcagatgtaggggagaagggaagccagctggctgcgggacagaaacaacgtctggccattgcccgggcccttgtacgagacccgcgggtcctcatcctggatgaggctactagtgccctagatgtgcagtgcgagcaggccgtgagtaccgtgagagggcaggggacagtggggcctgggaggggcatgctgggaggatcagactgtgcagaattgggcagagggaggacgaaggacctactagtggaaacagtctgtgccttcttggggttggggaatggaatccggtggtgtgagggcagccccagttccctcctgggcttccattcctccagctgtggcagtacagccgggagagaagggcagtccaggcctttatctactgccctttcctaccttcttttatttcacaccttctttaccctaaatcataagagatggtgcccaggtggatgtggtgtccatctcattcctgtctttctgaggcactgtgatcaccccttcagctgcaggactggaattcccgtggggatcgcacagtgctggtgattgctcacaggctgcagacagttcagcgcgcccaccagatcctggtgctccaggagggcaagctgcagaagcttgcccagctctaggagggacaggacctctattcccgcctggtgcagcagcggctgatggactgaggccccagggatactgggccctcttctcaggggcgtctccaggacccagagctgttcctgctttgagtttccctagagctgtgcggccagatagctgttcctgagttgcaggcacgatggagatttggacactgtgtgcttttggtggggtagagaggtggggtggggtggggtgggggctgtctgtgtccaggaaacttaattccctggtgactagagctttgcctggtgatgaggagtattttgtggcataatacatatattttaaaatattttccttcttacatgaactgtatacattcatatagaaaatttagacaatataaaaaagtacaaagaagaaaagtaaaagtacccattgtttcacttcctggagataaccatagttgctattttgctgcctgtcccatcagtcgtttatctgttgtttgagatagaaattaaccaaaaatgacataaatattcatgagattgccttcctatatccttccttgttcctaccagtgtctgctattttgaagaagctagggtctggagggacagagaacagttccctgattaacagtattaatagcgacattggtaacagctaccatttatagagttttaatgggagtaggagctatgctaagtgtttttcatgtattatcgtttttaatcattatccccaaccctatgaggttggttattatccccattttacagatgaggaaactgaagctcaaagaggctcaatgactttcccaaggtggtcgtagtggtggagttggagtttgaacacaggcctgaccctagagtccacaccctgacccaatcaattatattgcatcttgggtccataaaccctaatccataatcccatcaagaaaagctctgctgctcttagctctaaataattcagaatctattctcttctctccagtcccgttgttatagtcttcactcatagacttaagatgatcccatcaccagagaggtttctctaccattagcttccctcttccggccattcttcacaaagtcatttttctaaattctgtgtcacatacgatgatggcatttctggaaattccttcaggtgctctcaagccctgctgcagagatccttttcagagcacacactgttccagcccatctgtctcaccctctcctgttgtatccagctccacgacaaactttctgccttccccaacacctttgtgcctttgcatatggtgttttcttgcccattttctgctcgactcgcccctgattttcaagttcaagacttaactcagggttcaggtcttccaggaggccttacttatgtcgtcagtctggggaactctccatgtgcttctatcactgtgcggttacctctttcacagcccttttaaagttctatcttccctttcccaccttttttgaccttccactagaccatgagcacctgggcggaaagccatatatcttattaagctttatatctgctacctggccgagggctaattcatagtggagaataaatagtcaattgaataaatgaataaatatctccaccatcgtactaatcttaatcctccctgcccactcccaccactgaaaatgcaacattgtacacatcactggttgttgggagggacttaccttggaaagttgctattctaggaaagagaaaccttcatattcctggaaacagcaggtagtttccagtgctggcaatgaattccccagaactgctgttttggattttttcttgcctggcagctgttgggagcagggtgcagtgaggatggagtgagagtgggcagtttcttgtgcagatttgcctttctttcatcctggggctgacttgcagctccacacccatccatctctcaaatttcacagagggtaaaataggcatttggagagaaagaactctggcctgattcctttctctcccacaaatgtcctttattcataaaacaggaataataattcctgtatctcccaactacatggaagctgcagccctcacagaagaagatgatctgagaaattctttgatttcctcagtacagttatacccatgcatcataatactttaagcctggaaggcatcttaaaaataatgcaacagtcaaacctaattttacagagaaactgacatgaaatcacgcagctaatcatgataaagctgggtggaaaacttatcttgatgggcagtacaggaagatgcagtagaccttaagatgtcctgaaagtttcttatctcaggggaaactcccaggtaggctttatgtcagggacacagaaaaatgctccctgaaagtcaaaatattcgggctagacagacaaattcctgtaagtgtggtttgtctgggaaccacagatgtcactaatcctggtttgctccagagttctttttgttcactcctaccccccatcaccatttgattgatctccttaccctgtaatttccccttcttgtcgcttacctgcagtatctttcccacccaggcatgccttattctttctaaaggaaagtatgaatggagaggggaaagcttgggaaactgatagatttccttggatgccaaaacacctccatagcctgtctgcccggccctatgtggaaacagcattgagtttcaagtcctttatgcctccacccagggatagccacttggaatccacatggcaattgtgaaacaagcaggaaatgcgtaattgtcagaattttgtggggaaaggactagggaataaggaaaacaaagatcttccttgtgttttagagctgtcagctagaggagcacctgcttgagtctgatgccatctaatggtcccagaagaaactgggttttgaacctagagttccatggactcttaggaattagactcctactactactaagcattcactggtgcttactatgtgctattgctgtgccaagtatctgaaacctgtcttcttaccttatttttcaagataattctatgtggcaggtattactatctcaattctaagagtgagaaaatggagttttagaaacatttactaacttgcctgggtcacatagctaaggaagaggtggacttgcccagctttgcataaaactcctcaaaagagttgcctatactccctgactccacttatcttcctactatcctctttttaaaatatattatttatttatttaaataagcaatatatgaatgtggtttgaaattcaaaagacacaaagaagtatacagaggaaagcctcactctcaatccttctcaaggtttgctaattcctcttgcataggcaatccgttcttccagctttgtgtttatctttccagagaagtttactgtgtattaagcaaatatgtatatctttattcttgctcagtattttcgcaaacagcagctgtctaagttcactgttctgaactttattttttaaattaaaaatatatggctatgtagtattctattttatggaagttccatatttcatttatcctgtttccttctactgatggctagttaggttattggaagtcttttgctgttgctagttagtcttgtatagacattgtaatgcacatgtgcaaaaatacaagtatgatacaatcttaaaggggagttgctgagtccaatatatacattacaaatattgatagatattgcaaaattgccttcatagaggctgtattaatttatagttccagcagcaacatatgagtttatctgtttctccatatatatatatatgtatataaccaacagacagtgttaatttttaaaattttgacaatcttctgggtgaaagtagcattgtattgtagttatcatttgctttttaatattatcatgtaagtaacagagatactaaacccagaaggataagggagcaaagatgagaaaaataaacacacacacaaacaacaataacaaatctgtctaaaatattggaaaatcagaatgagaaatgaaatatgactgtaacgataaaaatcagtaataaaaatgactattaaatttaaaaataaggcagagcaaccacaagtgacatgagaatgaggcagacaaagttaaagcacctaaagtctttgtcttgtttgaaaggagggtagagatattgattaccttcagatgctgccacatttggtaaacatgttaaaaatataagactgacttttaactaatataattagaatttaaaattcctaaatcagtaaggggaaattaaataatactttaaataaaaatgtaattgatttaatataagtgatgcaaggaaaacaaaagaagcaaagtaagacatagcaaatacagagcaccatatattgtaacagaaacgaatgtaaatagcacagtgatcacaagtataaatagcttaaatatgggagttaaaggaaagttctcagattagattaacaatatcgcaaaatccagttatatgcccttcataagatcacaagaaacctaaaaacatgaaaatgttaaatcaaaaccagatataagatacacaaagcaaacactaacagaagacagaaagacagcttatgtaattacagaaatatctaaacatatagtctaaaaccaaaggcattagtaaaaacaaagacagccattacatagtgataatgaagtcaccagaacattatactaaaactgaatcagtttgcacctagcaataaaactacaaaatatgtaagaaatataggagaattataggaagaaattaattgagaaattgaaacacatttctcaatgattatagaataagtggaaaaatgaataaggatatcaaataagcctgttgatgttcttgtctgtaacatctaggaatcaaaatatattctttaaaactaataaatcaagtgctcgtatttacacatttaagactacaaaggtagacacacacacagaaagaggaagggagaggatatgagctagttttgtgattgttcattatttaaaactaataggaattatctaaaggaagagggaactaagtgtattatatacaaataaacttatcaaagcaaccttgaaatatacaccttccttaatatctgaaaaggtaaaatttttaaaatgcacaataaagacatagtgaaagatttttaaaaatactcatgtaaacattatacttaacagaagttaatatctctgaattagactgaatctatttgctgtatgaataattataaatgggcttcttaactgaactaaataaatgaaaatatttttaaattagattaagataaaaactctattatttgcaatatgcaaaagacacctaacataaagccactcagaaagatgtattcattattttcaacaaataagatgatgggcaaagacataacaagagaaggcaaacaaaagggaagcagaggtcacattcgtcttaccaaacaagatgaaattcagacactcctcaccaaaaaaaaaaaaaaaaaaaaaaaattgagtgtgacagaggcacttataatgtaaagtataaaattcatatgaatatatgagacatgtgtttaagttctaaataccaaataggtagctcttataaagcagaaattaaggtagatacaaggaaaatattcagaaatgtactaccaatagaacactttaattccctttccctggactagaccagttaagtggacaaaaaaataggctgggcctggtgattcatgcctgtaatctcagcactttggtaggccaaggcgggtggatcacctgaggtcaggatttcgagggcagcctggccaacatggtgaaaccctgtctctaccaaaaatacaaaaattagctgggtgtggtggtgggcgcctgtaatcccagctacttgggaggccgaggcaggagaattgcttgaatctgggaggcaaaggttgtagcgagccaagatcgcaccactgcactccagcctgggcggcacagtgagactctgcctcaaaaaaaaaaaaaaaaaaaagtatgaacacagaagatagaagatattactatcaataaaaaaatagatatgctacatctatatcaaacttttaaaattgaaaatagaggccgggtgcagtggctcacacctataatcccagcactttgggaggcctaagcagtcggattgcttgaactcaggagctcaagaccagtgtgggcaacagcgaaaacccgtctctacaaaaaatacaaaaattagccagatgtggtggctcgtgcctgtggtttcaactacttggctgaggtgggaggatcgcttgggcccagttcaaggctgcagtgagctatgattgtgccactgcactccagcctgggcaacagagtgaggccttgtctctaaaacaaacaaacaaacaaacaaaaattaaatggctcaatggcatagaagaaaatttttttatgaagcaagtataatattgatgttaaactatgacaatgcacaaatataaaaattgtagatgaatttacttattatactgacacaaaaatcctaaataaaacattgcaaacagattctagcacagattaaaaaacacccattaagatcaaggggttttttttgttttttttttctagaaaaccctttggaagttcatgatattttgaatttcagtggatatttcctgggaataatgagttcaaatgaacgaatatgtggaacaaagcatcaccaacatttattttttcaggatgaggtgatggacaaaaccatcacagggaaattgaggcaaatagtacatgtaaaacaatacttcgggtgagtccacctatcccaaagtcgtatcaaagaagtggctgcagattggagcccaaagcctttggttcctcagtttccaaatggattctcactaggtgggatcatgagtttgctttggacaccccaaattctaactatttcttttgtttcttacatcctttccctcttccccagccccttcccctcatgttacacctcttgctggtttgagacgtcaatcaccactgagaaagaattaaaccagtattttgagctggcaaaattcttagcctagtacaattccttcaattaaactgtagctcaacaatgtgttctctaaaagtatgatttaatattctacctagaaactcagaatatttttcataactcctccagggcagtgtggattatgttgatgtgttaggaggaagtagaaggaagaaaatgaattgagatgtacgttttacttccatgtcaaagtcaccaaaatagcagttgaagggatatttgtgtcaggcaatagggagaataataattttatgccaccctcaaaaaacaaccacacatacacccaaattctctcactcctcagagaaaggggaaggaaagaaaagagagaagcaaaatatgagcttgagtgaaaaatcacagaggagcctgtagctatttagggagggctgctggctgaagtcaggcaggaaaaaaagatcaaaacaccctgccctatttttcaggctcgttcaagtagaagacaaaaacataaatacaggagaaaggaagaaaaccacatctttttcctcttgtctccccagaactgaacagtgtctctgataagcccaggcccttctatcgtagacactgacactatgcacagaaaatgactcaaaaacgcttctaatgggggtgaatctgatgcttcagtttatttaagatgtaccagaggccatctaaggagatccatagcttgctaactgaagcttattgctttctcttcttagttcccatgccaggctctatgccattccttgcttgtcatgtgagatcactgatttcctttggttaggtaggatatgatttccttacagagatctgtcctgacaccaaacagctatgatgaaattccttggttattttccctttttgtgtaccttatcattaccggaatgctaaagctgtaggaataaagtttccctggcttcccaagaaatacagtgtgacagaaaaagtatagcctagggacttactagttatgtgaactttggttcattccatccttacctcatctgtaaaagggagatcatgatagtatctactgcaaagggttttgtgtgatgattctctctctttctctctctctcatacacacacacgcacacatttatataatgcttagaaaatgaactcataataagcaattgacaaacattagctattattatgtaggcaagtcagattttagagtttgtgagccttagacacatttacagagaagaaagagcagccctcctaactttctggtccagcgccatatcctccacttcctccccatccccacatcccttgccatttatcaaccccctctctcctctaaatctaaatacaggcccccgtttgatccatattgtctaggcccttcctctcctctccacatggcccttccttcagctctgagggaagctgcagaagccagccatggtgctgtctacaaagaaggggacacacgcctcttccacccgctcatgctgttactgcatctgatcatctccgtgccgtgtccttgttcacttagcctgtgttgagtgtttgtctccatttccaaatgcaataaaacatctgggaaagactaaggtaggtgtgggcaggaagaagggaggaagttagacccagtggcttgagtgccctctgatgcctccttatcctcggctccacacaagccctcgccagtgtgagctccacagccatccacctggaggaggagtactcaaaaccagggtcaaatgccttgtactcgggggtctaccagtaagcctgtggccagccttccacttcatgaatcgtcacatttacatgagagatgtggagggagaggggtcagcctcctagctcctgtcctgtagcagttaagtcaagtcaggccaggctgtggtaaccaagccagtaccttctttaaagaacagttgtttctcattcatacagagtgtgttgtaggtgtgagtgattccctggggcagctgctcttcatggtgactcagctaattagactgcttttctactgggattgtgccatctcaacacaaggctgtcttggttgacttggtaggggaggaggagaagagtcatgcacgaggagttaaattctttgaccaggaaccttttgttcactttccattggtgagaacgagtcacacagctccaggagagtaggaagtctagtttctcgttttccatgggcctaggaattagaggatgaacactagcgatgtcttccacgtcttgctctctttttctttacctgttataatctcccatggagaagaaattatttttctgattggtctgatccaggcctctaaccaagggcatttactaagggtcatagaacagtaaaaggttgcacaattgcatctcacctctcttttctgaatcctgcttaattaaaactttaaaaactcacttacagaccacttcttgctcttcttagttatcaaatatattttcttccaactcctttttgacagatcttgccttgttctcagctgactcccttgcaaccatctaaatggaacttcctcattcccctttatcccctgctaatcgtcctgtctttattcttttatctgaagaagtgtacccttcttcccccaagccttatgctctctgtcttagtccatttgtgttagtgtaacaagatacacgagatagggtaatttatgaagaacagaaatttatttctcacagttctggaagctagaagttcaaggtcatggccctggaagatttgatgccttggccatcgacttgaaaaaagtcactgaagtgaacttgtggttaccatgataccctgggttcattcttaacatgcacagtataggcaaatcaggggcacatttcatgctgaaagatgatgtgaaatgatgagtaaacattgccctttaaataataataacatagatggtgaattacaatttgcacttttggttttatttgcttaaagatagtgttttactgtctaggttttactgaaagaatacttaactaaacacttgagtcaaatcattccagtgtaacagtcctcacaaggaggaaggcagaagggcaaaagtgccaagctattgcctccagcccttctatttttattgattgactgattgattgattgagacagggcctcgttctgttacccatgctggagtacagtggtgcattcatggttcactgcaactttgaacttctgggctcaagtagtcttcccacctcagcctccaaagtaactaagaccacaggtgcatgccaccatgtttatttctttaattttttaaattttatttggacatgggggtctcactatgttttccaggcaggtctctaactcctagcctcaagcaatcttcctcctcagcctcccaaagtgctgggattacaggcatgagccatcatccctgctctctctagccctttttaaagtctctaatcccattcaggaggcctctgcattcatgacttaatcacctcctaaagggcccaccttttgatactatcacattggtgattaaattgcaacacttgaattttgagtgacattcagaccacagcattttggagaaaatgtcccctttcttctcttttttctcttcagtttctcctttctacagataccttgcacttcacttgcaaccttgttgaagtctctcctgtcttaaaagtttcttttcccaaaacaccagaactcattccttctgtctaactgtaactttgtacttgttaccaacctctacccatttctacccctgactccccagcctctggtaactcctaacgtactctttacttcgatgaggtcaacttttttagattccacatatgagtgaaatcacgtaatatagtccttctgttcttggcttatttcacttaacatagagccctccaggttcacccatgttgttgaaaatgacaggatttcatgcttttttatggcggaatagtattccatcatgtatatatatcacatactaattaccctgatttgatcaatacacaatgtataggtgtgttggaacatcatgctgtaccccataaatatgtacaattattacgtgtcaatttaaaaaacccaagaaaagtattttttcttagtgttgtttttttctaaagtgtatcccattttttcctttgttttcactttcaaaattcttgaaagactattttaatctgcggcctttgttttcttgtttccaattcattcttttgaaatatggcttctacctttaacactctgctgtcctcttgaaggttattggtgccctactaaccataaaacacaataatgctctcttagattgtatcctggtgagcctttttgcaaaattttattctttgagaattctctttccatgttttcttttcttttctttttttgtggtcattttggcttataggaaatcgtactctccaaatgttctctatgtcttctatttcttctctgataatccctttactaaatcttcttgaggcatatgcttcagaatgcttaatttacatactcttaattccttcttaatttacacactgcctgtcggcaatgtcaacacccaataagaagggagacctattggtcagaacaggccagggaatagaagaatacataataaacagtctgcctagttcttctagggccccataatatgtcaaacatatatttttacttcttctcccagcccatttttagtatacctaaattactgtcagtgattctgcaggcaaacaatggttgagttgtatgacacaactttgtgaaagtatcctacccagtacctgatgatgcaaaactcttctatcttgattggttgtcaatctgaggagtttccaatcctggggaagccagaaaaacagcgatttatactcttaatgggtactttctgactgaattttatgagctcattctgaagaggctgacgattttactatctcatttttttcctttctccagaatgggttctgggtgggtcccctgggtggtggctctgctagtgaatctgacccgactggattcctccatgactcaaggcacagactctccaggtaagaacagagcaattgtttttttccagtgtgtatgcaagaattggcatgggggagtgatgcctttctttgtaagtccaggccacagaccagactggaagtggcttttggtttcaaagaacagtgttcttccctttggcagaaaggtacgccttgcctctttacatgggatggacttcatataccagagccacctattcaaggggtagggaggcaggaagagggaaacattgtgtcttgtttaggatccttattgtgtgtatcaacctcagtcagtgcctgggcgtgttgaaggccttggcttgggttcgagcctgctgggagaaacaacctgcagtaggctgggtcacagaggcaatctgtgattttttggtcaggacacggaaacaaatctcagttggggtatatgtggacaaatgaaactggaaacaaaggttgctccttctgtcatttattaagccactattatattgtcagaattgtactaaacagttttgagaagtaagagaagttgaatagaatacattgtccttgtcctccgcccaccaggtacaagttacttgtcactgttatttttctagcacaggtgacagaatatgcagccatgaagcaatgtgagatgaaagcacatattaatgagcagaaacaggatgtaatgtgctaagaacagaatcccctttgcatgttagtttcattaaatacaaaagaggaacaaacctggccaggagagatcattattctcagagaatagaaaccgccctgagtttataatgtccattaaacaatacaactgaaaaaaaaatcagcacagatgttaaatgatgatgaaaaattcagatttcccccctagtttagactactagaggaaatagagaagagtatacatgctgagaaattacaggctggaacttcatctgaaattagctactgagtgagggataagtggggttcacctaggaaggtcattcttatggctcagttcagagttggaggaggctaaaggaaaggtaaattacaacccaacattaatagcaattatctttcaagtcttgacttagatgcaatgtcttcaggacgtccttcctgacttacctacattattaactccatttgaatttcctttttattgtagttgttgttcttaagtgcataggattggtttaattttacccaatgagttcacagcacattgtaattattggcagtagtgcaagactctctcgtctcttctcttgcctccgttctcattctctcccctccctagagaatccattctaaacgtgtctggtaagtctctaagtatgagagtggcttttagaaatatgtagcattattgctctttatgtgtttttaaaatttaataaatgtcattctctgttgaatcccattctgtttcttttctcacttgacactgtgctttttgagcatactgaggtcaaaggcctcctcttagatccatgtggtctgacgtaatttaccaggcatgggttttcccagaggagggggctggttcatggttttggttttggttttccagaagattttgtgattcaggcaaaggctgactgttacttcaccaacgggacagaaaaggtgcagtttgtggtcagattcatctttaacttggaggagtatgtacgtttcgacagtgatgtggggatgtttgtggcattgaccaagctggggcagccagatgctgagcagtggaacagccggctggatctcttggagaggagcagacaggccgtggatggggtctgtagacacaactacaggctgggcgcacccttcactgtggggagaaaaggtgagctggaagctgaggtctggcggggctcaggaatgtcccccatgtgaacctggccatggctcttctttcttacaagcaattttctgctttaggataaatggttgtctgtgtagatgttctggccccagctgtgatatattatcctcacaagtcagccactgtgatcttggtctcagacccccaaggttctcagggacttcgagggctattgtgccctcaaagagaagcagtaattgtgggagtacctcagaaagtctaaatcctcctgacaggcattgacataccctgttactgatcttgggggctgagacttgcctatactttgtgttcacttgggtgatctgggaaagagattagacatagtgatagtccctaaagaatctcctgtcccagcttggtggttttctttcacggtgtctcatttttcctcccttcctagtgcaaccagaggtgacagtgtacccagagaggaccccactcctgcaccagcataatctgctgcactgctctgtgacaggcttctatccaggggatatcaagatcaagtggttcctgaatgggcaggaggagagagctggggtcatgtccactggccctatcaggaatggagactggacctttcagactgtggtgatgctagaaatgactcctgaacttggacatgtctacacctgccttgtcgatcactccagcctgctgagccctgtttctgtggagtggagtgagaattagtttctagtactctctgggcctgactcaggactatactgactcaatacagagcctgtgtcacttctgcgtttatcttggtcacaacatgaattattctttcccttgatctgggacagtcacagaaaccagagtccttgggttagggtgggagaaaacatggcagatatctatcctcatatcttccaagaaatgaggagatctaatcacctcattatgtgcttccaaccctatgaactggtgtcctctaattctttggtcttagtatttaggaggcattcttatgggctgtgagaatctgtaaccgatggggggtaactccatgggtgccaactttggtttcgaagaaccttttctaaatttatttatttttctctagctagcattggatttggtgtctagtacagattctgggattccaagaaagtgctttaaatattgggatatttttactaatttaaagacctgtttcccataggagctcagtctgaatattcttggagaaagatgctgagtggcattgcagccttcctacttgggctaatcttccttctggtgggaatcatcatccagctaagggctcagaaaggtaatgagcctgtgaggagtgccctgccacctgtcccagaccttccccactcccaccttccctaacgtcaatgatctgaggcaaggaaagctgattgtgcctctcagggatcaccgggataatttttttctgaagctagaaatgggataagcagagagagtgctgaccttgccagccatttgttcttccctcgggataatcatattgggtcctaattggggcaatccattcttttctcgatttctttccaggatatgtgaggacgcagatgtctggtaatgaggtaatgtctctttttccttgtctttgagtggcagatcattctcccggttctttggccagagggagatgacatgggggtagggaggagtaaggttgctgctgtctggatgggactgtcccctgagtctctggaacggctgtggggggtggtgaggctgcctcctgagaccttcatcactgtgcctccaggtctcaagagctgttctgctccctcagtcatgctaaggtcctcactgaagcttctctctctggagcctgaagtagtgatgagtagtctgggccctgggtgaggtaaaggacattcatgaggtcaatgttctgggaataactctcttccctgatccttggaggagcccgaactgattctggagctctgtgttctgagatcatgcatctcccacccatctgcccttctcccttctacgtgtacatcattaatccccattgccaagggcattgtccagaaactcccctgagaccttactccttccagccccaaatcatttacttttctgtggtccagccctactcctataagtcatgatctccaaagctttctgtcttccaactgcagtctccacagtcttcagaagacaaatgctcaggtagtcactgtttccttttcactgtttttaaaaaccttttattgtcaaataaaatggagatacaaaaaatgtacattttagtgaattatttaagaaaaacccctgtaatcaagtcaaggaacaggactttgccagctccagcggaagtctctgtacgtcaggccaatcaaagcctctccttcccctcgaaagtgaccatatcctgattttattgtaacctctttcatgtctttgtagtctagtcccccaggtatgtgttcctggacgccacagcttagttgtcttttacgtctctcatacttcactggtttctcccccttcagcctttttttcccccttatgattaatctgttgaaaagctcaatccatttgacctgtagagtttcccacactctggattttgctggctgcgtacacatggtgcagtgtaacacatcctctgccttctgtgcctcccgcaaattggcatctggatgcagaggctggatcagactctggttcaatcttttcctttggaaaatctatacgtggtgttgtggcctttcaccatgagagacataatttccagctgtttctttttgtgatgttagcaaccattgatactaattgcttaggtctgttaatttattggggattgctaaatggtggtattctgtcattttttcttcatttatatgctttattaatgctacaaagagacagttcccttcatttactagtgaagagacacttccctccacttactagtgggctacttagtggtacagtggaaaggcaggatcagtgtttgactctccttttatttaccagttttcaagttagcaaattggtttcctactattaataaaacctacagatggccaatcaggttttacttttcattctttaaataattataaacagaaggatttaaatgtttgataggttttactctattgcaatttttatgcttgttaaagcttatatcctacatttttggtgagtgaaaacttcttcaagtggctaaaaatgaaactgagttcttttgacgcaaatttcttttgataatttctttgttatctgggatgacaacatgtttctggttcatcttgttcatttcttggccagacctggaggtagccatttttccagaaatccctggtttagtttagtgggaaatgacatttaagactataatccagcgttagggtgttttgtcccactgaacccgctgctggagtcacctcaaaagtggcgtcaagggagttaccacaaggaagttcctgaaaccattctgagatggtgtgggttaggattcaaagaaagaagcactaaatgccagggtgatcagtccaaaacatttgtttagggaatttacctacagagggcttcaggagtccttgcagacagcaagagaaaagggatgttctgcctaggtatgtctgcagcgagggggtcagggtatggagcttatatgaaggtttaaggaacctggctcagggctgggacaaagtttcagtgtttagagaaacaacctagatacgtttatcagtgcctgggagtgttcaaggccttggcttgggttcgagcctgctgggaaaaacctgcagctggctgggtcacagaggcattctgtgatttttcggtcaggacatggaaagaaagcagggagaggggcagtgggggagcctaaatagataggaatggtcattgtgtccagcctgttcaatggcaataaaacatttatacatgtatacatttaaaaaaatcagtcatccaggcacggtggctcacgcctgtaatcccagcactttgagaggccgaggcgggcgaatcacgaggtcaagagattgagaccatcctgggcaacacggtgaaaccccgtctctactaaaaatacaaaaattagctgggtgtggtggcacgcgcctgtagtcccagctactcgggaggctgaggcaagagaagcgcttgaacctgggaggtggaggttacagtgagccaagattgtaccactgcactgcggcctggtgacagagcaatactccatcttaaaaaaaaatcagtcttctctatattacttctgcatctcctttcttttataccaagaactctggttttcaaggacacagggacagacacaattagaatgtccatacttatttgcttttcctgagttaacatagacagcagtctaaggataataacactcatacacaaccaccaaaatggctactgaaaacggttgaaattctttttacctacattctccctattacctgtgttctccctttttacctatgttctcccccgctttctagttgaactatgtctatattagttgatcctgtaccattgcatagactacttgctcccttgttagtcttagttctgtgagtagagatatgtttaatgctcaccatcattccttatgttgatatccctgtcatgtggtggttttcaaggtgtggtccatggattcctgggggtccctgggacccttcaaggggcctatgaagtcaagctatttttgtactaatactaagatgttatttgcctttttcactgtattatttacatattggtacagaaatctatggtggtcacgtgaaactgttagtgcctgagcacaaatcaaggtggtgacacaagctgtacaggtaggtcatgttcttcactcgccataagcttacagtaaaaaaaaaaaaaaaaaaaagcaaaagccagtgaccttgatgaagcaataaaatcattagtttactaaattttaaacctcaagcacacatctgtttaatagtcagtgtaagaacataggcagcatttctggtgcatactgatggaaaggcagttgtcctgtggaaaagccattatgtaattgcatgagttgtgagtgaagttaaacattttttttttagtgggtcatcattttccttgaaagaatgactgaaaggcacactgtgattattcagacttgggtatttggtagaaattttctcaaaaataaacaaaatgagcctatcccatcaaagaaaataatattgacagtggaaattggaatttcaagagaaaattaaaattttggaaaacttacgtgtgccacagcttctcactacttaaagatgtttctgatgagattggtggtgatattaacaaatatggcttaaaaaatattgtttaataaaatatgtcaacattttaaaaatctgcgtaaacccatgaatcaataatttacaaataatcaatgcatgatattgcaaagtcatgcataaagatccatttaaagatagactagtgaattttaacacaacagaatatgaaaagttaatatataaggtttcagattccacactgcaactaacctttaagaatctgccatttcttgagttttggtgtcttatcaaggaagaacagttacgatagctgaaatggttatggaaactttccttcttttcccaactgtgtataagagtgaggccagattttcctcttgtgctttagccaaaacaacatattgttacagcttgaatgtagaagaatatataaccaagctagctttattaagccagacattaaagagatttttacaaatgtaaaataattccttttttttcactatttttttgtgctggagaagacagctattttccataaaagtgtgttgtttatgttaacatgtaatgggtttgttattgttatttaataacaaataaattaatataaatgtcactttacataacccatgtaaactaaagcttcttggtgttctcaacaattttatgaataaaaagggatcctgatatcaaaagaattataagctactgatgtagtcatcatgattgtttgaaactatttctcctaggtgcctcaggaagacttaggaaagtgtcttagtttgtatgagctgctataaccaactaccagagactggatggcttaaaaacagcagaaatgtatttttcacagttctggaggctggaggtctgagatcagtgtgtcagcctggtagggttctggtgaaggcctgctggcagcatcttctcactaagacctcatgtggcagaaggaaagggagctatctggaatctcccttataagggccctaatgccattcataagggctgcaccctcatgacctaatcaccttccaaaggcgtcacctcctggtactgtcaccttgggcgttacgatttcatcatatgaattttgggacggcatatacagtccacaccaggaagttcttgcacttcatagtcgaaagtcagttttgtggctataaaaatcttggttccattttccgctcttgagtatcttaaaaagttactacattttcacataactgctatcaaaaagtctgatgataatctaattattaataagtcattgctacttttgctgagtatccagatggtattttctttttctttagtatccacaagttttattggaatgtatcttggttggggggagggcaagatcgctgactagatgcagccaggtgaaacagttctcaatgaggaacccagatgactggcgtgctcctaacagatgttcagacagaaggcacctagagtggacagagggaagacacagaagctggactgaagtgggagaaagctgggagccctacatggggctacagcacatccagactcattcctgtcctccaatggctccaggaaaatgggtgagttgaactggcaaggaacaacccactgtcactatgacctctgcaaccatggcaggaggagacccattgaccaccatggacacttgagttggcaggaagagctgcttagagaagccgtaggggtggcaagccagcgggtgtggagcctagaggattcagtgcaggagcatctgcagtggagcatggccagggatggccatttccctaggctcaacttactcccataggagacattagccctagggaaactgttggtcctgaaatctgtagggtggtcttgcccatcagatgagtctggttctacctgagcaaccgttggtcttctggcctctcctggggccctggcctggccacatctgcttgcaaagcagcctcaggtgctctgtgggcctgcaccatagcttctacactggcagaccatgactgaccagtaagtggagagctccaacgaggaggcccctatgaccaggcaccagcctgcatgctccctccccacactgcagcttcctctgggcccacagcaactccccacatcattttgctggtacatgtctgctgggtgggttttgttttccttgcctcaccagcatataggagtgtaattcaccccccaccaattccctcctgacagccattgcagacagagccttggtgggcacagagccagccagccccactccctccatcatcccaccctgtgctaacactgtgcagagaacagctgatcctcccccaccctgagtgaccactcctgcacagaaaaggcacgcagacctgcacctgccaatgccttgcccctaagccaacaccacttcctgtgtgaccacacacacagttgccagcaggggacccccttcctttcctgcagttgcattgcctctgccactgtggtggatgcctgcagggaggtgggcaccccggcacctgctagtactctgctgcagcttcaactaccactgctgctggtacactcaaacaaggacagatcctcctgtcactgtactatgaaacactttggctgacaccactcattggagtgtagtgaccagtggtctgggagcacttcggactgcaccactcctgccacctcccccaccccccgcccatcacagcggattcctaattctgaggaaacagagaacaaagtcagggccccgtacaagtcccaaagaattacagcatgcagtccaggagttgggagtggaatactggccaaataaaattgtccagaaatgaagtcagttggctgaatccaccttataccacaatcaaaccctcaaagtcatcaaataggataaataggataaataaaaaaggttggatgatctttgctgtccaaaggtcagcagtctcaaagattaaaggaaaataagcccacaaagatgagaaagaatcaggcaagaaccttgacaactcaaaaagccagagtgtcttctgttctccaaacgaccacatcacctctcgagcaaggattctgaactgggctgagatggctgaaatgacagatatgtaattcagaataaggatagaaatgaagatcattgagctacagaagtacattgaaacccaatccaaggtagctaaaaattatgataaaacaatgcaggagctgatagataaaatagccagtatagataaggacataaccaatttgatagagctgaaaaacacactataagaatttcataatgcaatcacaactattaatagcagaactgacccagtggaaaaaagaatctccacacttcaagactggctttctgaaataagatagtcagacaagaatagagaaaaaagaatgaaaaggaaggaacaaaacttctgaaaaatatgagattatgtaaacagaccaaatctatgactcattggtgttcctgagagagatggggagaatgaaaccaacttggaaaacatatttcagggtatcatccatgagaatctccccaacctagctggagaggccaacattaaaatacaggaaatgcagagaaccccagtaagatacttcacaagaagatcattccaaaggcacataattatcagattctccaaggttgaaatgaaagaaaaacagttggcagctagagagaaaggccaggtcacctacaatgaaaagtccatcagactaacagtggacctgtcagaagaatctctacaagccagaagagactggggccaacatttattattcttaaagaaaataatttcaacccagaatttcatatctggccaaactaatcttcaaaagtgaaggagaaataagaaccttttcagagaaggaaatgctgagggaatttcattaccactagacttgtcttacaagagctcctgaaggaagcactaaatatggaaaggaaagacttactagccactacaaaaacacactgaagtacacagaccagtgacactataaagcaaccacataaacaagtctgcaaaataaccagataacatcatgatgacaggatgaaatccacacatatcaatactaatcttaaatgtaaatgggctagtgccccaattaaaaggcacagagtggtaatctggataaagaaccaaggcctattagtatgctgtcttcaaaagactcatgtgtgtcatgcagtgacacacataggatcaaaataaacagatggagaaaaatctaccaagcaaatggaaaacagaaaaaagcaggggttgcaatactagtttcagacaaaacagactttaaaccaacaaagatcaaaaaagatgaagaagggcattacataatggtaaatggttcaattcgacaaaagatctaagtattctaaaaatatatacctccaaaagaggagcacccagattcataaagcaagttcttaacgaccttcaaagagacttagactcccacacaatgatagtgggagactttgacaccacattgacaatgttagacagatcatcaagacagaaaattaacaaagatacccaggacctgaactcagctctggatcaaatgaacctgatagacatcttatagaactttccaccccaaaaagacagaatatacatttttctcattgtcacatggcacatactctaaaatcgatcacataattagaagtaaaacactcctcagcaaatgcaaaagaactgatcataagaaaaaatctcttggaccacagcacaatcaaattagaaaccaagacaaaaaagttcactcaaaaccgtacaattacatggaaattaaataacctgctcctgaatgacttttgggaaaataatgaaattcaggcagaaatcaagaaactctttgacatgagtgagaacaaagatacaacacattagaagctctgggacacaactaaagcagtgttaagaaggaaatttatagcactaaatgccaacatcaaaaacttagaaagatctcaatttaacaacctaacataataactaaaagaactagagtatcacagccaaccaatctcaaggctagcagaagacaagaaataaccaaaatccagaactgaatggaaggagattgagacacaaaaatgattcaaaagatcaatgaatccaggagctggttttatgaaataattaataaaatagatggacttctagctagactaataaagaagaaaagagagaaggattcaaataaacacaattaggaatgacaaaggaggtattaccactgaccccacagaaatacagacaaccatcagagaatattatgaatacttctatgacataaagtagaaaatctagaagaaatggataaattcctgggcacatacaccccctaagactgaactaggaagaaattgaatctatgaacagactaataatgagctctgaaattgagtcagtagtaaatagcctaccaaaacaaaacaaaacaaaacaaaacaaaacccaggaccaaatggattcacagctgaattctatcaggtgtacaaagaagaaatggtaccattcctgctgaaactatttcaaaaaattgaggagaagagactcctacctaactcattctatgaagctagcatcatctaaataccaaaacctggcagagacacaacaaaagaagaaagcttcaggccaatatccttgataaacattgatgcaaaaaatcctcaacaaaataccagcaaaccgaatccagcagcacatccaaaagccaatctaccatgatcaagtaggctttatccctgggatatgaggtttgttcaacatataaaaatcagtaaatgtgattcatcacataaacagaactaaagacaaaacccacatgattatctcaatagatgcagaaaagtcttctgataaaattcaacactccttcatgttaaaaactcttgataaactagttattgaaggaacatacgtcaaaatagtaagagccatctatgacaaacccgcagccaacatcatactgaatgggcaaaacctggaagcattccccttgaaaactggcagaagacaagaatgccccctctcattactcctattcaacatagtactggaagtccttgccagggcaatcaggcaagagaaaagaataaagagcagccaaataggaaaagaggaagtcaaagtattcctgtttgcagatgacatgatcatatatctagaaaaccctatcgtctcagcccaaaaacttcttaagttgataaacaacttcagcaaggtctcaggatacaaaatcaatgtgcaaaaattactaatatttctatacaccaacaacagtcaagcctagagcaaaatcaggaatgcagtcctattcacaattgccacaaacagaataaaatacctaggaatacagctaaccagggaggtgaaagatctccacaagaagaactaaaaagcactgctcaatgaaatcagaaatgacacaaacaaatggaaaaacattgcatgctcatggataggaagaaacaatatcatcaaaatggccatactgcccaaagcaatttataattcaatgttattcctattaaactacaattgagatgcttcacagaactagtaaaaactattttaaaatgcatatggaaccaaaaaggatacatagatacaaaataaggacatgaaaacatgtgcaatgtcattagccattagagaattacaaattaaaaccacaataagatattactatatacctatcatgatggctaaaaataaaaagtaggcacaataccaaatcctggtgaggatgcagagaaaatagatcactcacatttggctgctgggaatgtaatatagtacagccacactggaaaatagtttggcattttctttaaaagcaaaacatgcaaccaccatacaacccagcaattgcactcctgagcatttatcccagagaaatgaagacttatgttcagagaaaaatctgcacatgtatgctcatagcagctttattcagacaaaaactggaaacaaactgtggtatatccatactaggaaatactacttagcaataaaaacgaacaaactggatacaggcaccacgacctggatgaatcaccagggaattatgctgagtgaaaaaaaaaattgcaaaatgttgtctactaaatgattccacttacataacactcctggaatgccaaaactatagagatggaaattaataattgctgtgttaatgaagaagtggaaatgggagggaagtggctgtggctacaaaagggcaaaatgagggatattatagtgatgaaagtgttctttattttaattatatcaatgtcaatatccagactgtgataatttactgtagtttacaagatgttatccttgggggaaactgggtaaaatgtacatgagatatctctgtaacatttcttacaagtgtctgtgaatcaacaattatatcaaaataaaaagtataatttaatacagcatcttaacattttcaacaaaactaagtgtcaaagtatccccataaacctcaaatacaaattggtgaggacaaaccactagtagttgcacgttattaatttttcctgttatggattatgcctttggtgtcaagtctaaaagctttttgcttaatcctagatcctgaagattttctcctgagagttttgtgactttatgttttacatattagactttgatccatttttatttcttcctttgaaatctgcacgccttttttttttctcgcccattacattatctagaacttccaacgccatgttgaataagcatggcgagagtggacatcattgctttgttcccgatctttgggggaaaaatttcagtctttcaccgctgtgttagctgtaagattttttgcagatgctctttatcaaattgaggcagttcctctctatttgcattttctgagcattttatcatgaatggccattgaattacgtattctaatacctcatatatgtacatcattaacttggattacacttctttaaatagctgcctgttctactggttgtcaaatgagctgtatcctttctatttaatgcctacatgaagtttttaaatatggactctatgtcatatatttagtccctttcaggtttccaacataaagtgatactatttcagctacttaagcacttatttaggatttatgcctcatgtagtttagatttattatgagtttgcacttacatttgattcctttttatactcctaatgtctttttttcttaaacaagtggcctatatatttggactcacaatatttatacatcctctgtcaccaggggtacatgtccttataccttaaagcacgtgcttctggagtcctgtcgtgttacatgtttcctctaaaacaaaccctccatgttatttgagagccaaccccacttttcaagttatttaggctgctgtaacctccattaataaaggattcaaaagtcataattgtgtgattctttaggaattatccaaaaaggcaatctgatttattttccaaatatcctggatctgaaataatctatcagagtttatttctatgcttggaaagcttccttggatgtcagcatttgcgattttcttacttagcttatgtagctaagtaagaaatgaattgcttttgttggtttcttagtacattctgtccatcaagtacattgagttgtttagaattgttttgagtcaacagtgtaacaagcatccaaaatcttgtatagtcaattttgtttgactattgtgctagaagatcaatttctatttcctctgttgacaatatcctgagcattttgaagttacacaattgcagtggtaatttagcggaagagtgttaacattttaacctaaataattgattttgtattaaacaaattctgatgtaggaatgtatttagtattaactatatggaattctctataaatctcataaacagagtagttgcttttttgaaggggattaaaaattaaatatcaacattttcattttagaaaataaaaaatgtggctcacgcctataatcccagcactttgggaggctgaggtgagcagatcacgaggtcaggagatcgagaccatcctggctaacacagtgaaaccctgtctctactaaaaaatatgaaaaattagctgggcatggtggtaggtgcctgtagtcccagctacacgggaggctgaggcaggagaatggtgtgaacccaggaggtggagcctgcagtgagccaagatcatgtcactgcactccagcctgggtgacagagcaagactctgcctaaaaaaaaaaaaaaagaaaagaaaaagaaaaggaaaaaatgtcttttttctttttaaaattttcctattttaatatttaaaattattttatcttttttttaaaaaagttatacatgacatggtttaaaacatcaaatacagatggttcctgacttatgatggttccacttaagattgttcagctgtgatggcgtgaaagcagtacacattctggaagaaatgtacttcaaatttgaaatgtcagtctttctctgggctagtgatatgtggtataacactctcacctgacgctgagcagcagtagtgagccacagctcccagtcagccacgctaatgtaagtgttctgagcatgttgagggtaggctgggctaaactatgatgtttgataggttaggggtattgaatgcattttcaacttgcagtttatcaggacacaaacccacctgaagtcaaggagcatctgtatttctacagggcttgttatgcaaaacagctgaccacactgcctccccattcctctttccagacagaaattctagtagatagtcccattttacaaatgagaaagtggaggcttagggaggttaattaagacacgcaagttcatatgggtaggaagcgatggagctatgataagaactcaaatccatatggtccccaagcctgaggtttgagctatattgcttcgtgattacaggatatattagtttcctattggtgctgtaacaaattaccacaatttagtgttttaaaacaacaaaaatttattgttggacagttctggaaattataagcctaaaatgggtcctgttaaattaaattaaatttggcttaaagcggcctctgtactttgaattcctacgtagtatactgaaatctaacttaatgtgtaagaaaattgtaccctaacttaagagcatattcttgtaataaatagctgagtctcaggcaaacacagcagccaagcttcaggcaatcacaggttgccaactgatcagaccatgatcaaataaggcaaatactgagctgtaaacaagctgcttctgtataccacttcctttttctctctataaatattgcctgcccctattgctcagtggagctctctgtacctcttctggtcctggatgctgcccaattcatgaattgtgctttgctcaaataaatcaaaataaatttcatttgttcaaagtttttcttttaacacttgtacagggctaatcaaggtgttagcttgtctgtgttccccttctgaaggctttagcggataatctgtttttgcctcttccagcttgcagcgaccagctgcattcctcggctgatgcccccttccagcaatcactttcctctgatttttgcttctaatatcacatctccttcttctattctcttgcctctttctttcacttagaaggacccatgtaattatatcaggaccacttggctaatccagaataatctccccatctcaagatccttaatctaatcactaatgcaaagtcccttttgccatgtaaggtaacagattcacaggtttcatagattcagatctttcaggggtggcagttgggggcattattccatctaccacacagagtaaagtttcatctggatgacccacaggccctacaaatacaaaatgtctaatatggaatgttctcttaaactgtcctttcttgatgactggaattactaaccacttggtctcccaagcatcttctgctctcgccttctcctctctcccatatacaatggatgacgacacatcatgttgcatctgctccctcacatgtctctgaccctctctctagatccctgatcctactttaattcgagccccatcatgtctggtctgtgttactctaacagttacccacgctgctttctctgctttcaattttatgctcctctaacccactcttcccatcagagtagtctttctaaaacgtgaagctgcccatgacccttcccttactatcagtctgcatactggtcctactgactgcagatcaaagacccaagtccttagcctggtgtgtgaggcatccatccctagccctctgcttcatctgtcacccacccattttaccaattccgaaagactttcacttccctcgaagcctgtccaagtgtccaagccgctcatgctttgttagacttggaagccattctccatataccctcgatcagcttgaatgtcatttccactagaaaattttcctaattgtttgtgacttcaatgtcctaattttacacacatttctgctgtgcccctttgtttgctaatatgtctcctgggtggtaagcaggactccgtgtcttattaatattttccgtctccagaattcagccactgtctgccacacaagtgcataatgagttactatactaatattatgcagccatgtcccctgtacagcagttccctggatctcatggcttcttttttgatttgccttgtttgttaccaacttccatcagtaagacaatctatccaatccttgtcccctttgccacatcacatcctcagggcaataacaaagttgttaagtttatgcaccttctccacttggagcaaggcctcaccatgtcaggcctccgcctgattctcctccctgcctgggatggcagattttgctctagtgggtctccaggccgtgaggtctcctgtcttttatgttctgatccgggtggtgagctgcagctcactacaagtccttacttgtctctgctggcctttagagactttgtactcaatttggaggaactactcttgatggattgtaagtgagaggatttcctggtctccctctggagtccgccagaaaaccacattctctgcttttcagcgttgactgctcatgcttacgtaatttctaagagtaagagcctatggactgtcctggcagcaaagaattcgctcaggattttgcctgaagctgcacttccggggtctcgcttcatcagaagacttcttcattttcatcatcggcccagcgatgcatgggtacctcttagggtttagccccagaatgtactgggggaggggagggtaaagtaggtggggaaggagtcagagtcgtaggtcatctgtggctggagttttgcatccctaataaacgggaaatgaactgaaggaagactgggttttcacgtcaacacgaaggacaccattacgatgctagactaatcatcaaataaaattccagatggaaaaaattcagaaacttaatttggaatttgagccccgctctattatgcaacgttcccagccattgctccgcggatgtaatgtggacttccaccgccagatggcgatcgagaccgtaatttaagttggttttctcaacttcctctggactgagtccccgtgaaaatcccaagtttaacgaggggctttcctcgcgtaaccttcgcttctgcttcctctctcacatcacctcaacctgcgagactctgaaagggataatgagggttggggggaatatggaaattcagggaagggagaggggggtggtgtgaagctttccagaccagccacacagaaatagcgtaccaatagtggtttagagcacagacccccagccagaatgagtaatttaaacagccctacgatgtaatcgttgtgtgcatatgcatctctatgcctctctctctctctgtctttctttcatctgagacagggtctcactccctctgtcccacaggctggagtgcagtggtgcaataatggctcgctgcagtcttgacctcctgggctccagtggtcttcccacctcagcctctgaaaccacagggtcttgaacttctgggctcaagtgatcttcctgcctcggcctcctaaagtgctggggttacaggtgtcggccaccatgcctgtctgctatttaagtgcatagaagaatgcctggcactcagttagtgttaaatatttataaaataaattaaaattttataacactacacacatgttgttgagtatgtcataaatagagacatatttaatgagatgtcaacatatatcacgttaatgaattaagtaagtttgagaatattagagaagaatgataatagattaacggaggaggctggcgcagtggcccacacgtgtattccagcactttgggaagccgaggcaggcagatcacatgaggtcaggagttcgagacccagcctggccaacatggtgaaactccttctctactaaaaatacaaaaaaaaaattagccgggtgtggtggtgtgcgactgtaatccctgctaatggggaggcggaggttgcagtgagaggagatcgcaccactgcactgcagcctgggcgacaaagcaagactccatctcaaaacaaacaaacaaacaaacaaacaaacaaaaaacagacgaaatagggtttgagtatgtagtctgctctcaacatgagatagtaaagtctttgcttcccttatattctgttaattaactcatttgatgcacatcgatgtataaagcctttaacttctatttattcttttccttgaaaagcatgcggaatgccttctcaggactctcccattttttatttgtgaacacccactggcattcccggatacgaagcttgcaagaaggtgtgaaccgccctatactcgtgagcccctggggctctgtactctttccagcccacatttgacctcagtcaatttttaaatgattccagctaaattcttcttaccagtgcccagctgtacctgccttaggtaagcaagcactcaggcaacaactttcctagatttcaagctagttggaagctcaatcccagctctgtgatgggttgaaaaaaattgcgaccttgcaatttgtgtgatttctttcatgttgcaaggaagcatcattgtttccagttctctgcatccccaagcagaaaccagaactctatataaacgtttttaaatggagacattgagaaaaagtacccgagaaaccaatgagatacaggaagaatgcttccagcactaacatgaatggggcttggccatacagatagaagggttggaaactcttacgccttgatttaaactctctatgcatattctgagcacgctggggaatgtactactactaggcttgatttggattcatggctactacctcccacaaaatgataggtcttctgttttagtacgtgagataattcctcaatcgatcttattgctgctatttctgttaagcataaacaatgatttgggtcacaaatttcaatggggtttaaattcctttgtgcatcccaacaggtaatcctcttactctgggctatgaacttgctactgccaagatggatgccatgaaaaaaagagatctcatcaaaatggtcacagagagatggagggcctctgtgtagatggcagggtggtggtggccgtgtaactagctgcccggtgaggagcagcccttggggagagcccaggtaggaccaggagaagcagaaatagagaaaagtgaaagatcgaggtggaaagaacatgagggacaagagctctgcatggccacatcaccagcagtcttgttattacaatgaggatgaagggactgaaaagaggggaagagatggaattcatcaaacaacagtgctcattcatacaaggtaagtatacatgtggccttttctctctctatctgaagatgtggcttactgtaacaggaactatcatgggcattggacggctgtctcatggtgatcccatcctcctctacatcctaaacttttttttgaatgcatttctgtattttgacttcctctctccccaaagttcttgttaacttctgagtatgacttagcttccttattctttgaaatatttgaaacccctaacttcctctcctctgtggtgtaactcacatggcttcttgataccaggaggcactgtctgcatacaacctcatattatgaggatgaaatgcccatgaatcctaccaatctgaggaacaacgcatttgtcttctctgacaaaatacgggtgccacatattctgtaggaaaaggtggtgttgaggtcagaacttctctgtttctctgtctctctctctctggttctggaaatgttgagaatatgagtgaagggaaaaagatgggcaccacgtggaggcaatttcatggtggcatgaaacaattttgggggcatgaatgccatgggcagaacatcagggccccaaaagggaaatacacagtactttctttggacttcagtgctctcttttatagtaatggaaaccacaagcgcagaggaaggggagctgattctataaaaagaagtttatttcctactttaaaagatgattttttgactatcttcccacaatagagccagaggatcacaggggaaagctacgatcctcaattatagaaaatgatgttgggtgcatctagcatcacagaagctttagaggacacagtcatctcaggtacctacagataaggaagaagtaccaatgagagtacctactcgtattcttattcatggaagcgaatcccttcaggaaccaaatcatttagctgctggtagatgtttcttttggctcctctctctcctgagctctcaaacacagacttttttttctgtgtgcctctgcttttggcaactctgttccaagaataagaatatttgtttgtagatgagcttgctaggtcggggatctcttgtatagggagatggtgaatcactgagcaggacacagaggcatgagttgaaacagtgagatgtaccttagtttaaagagaggtcacaagagctcatggaccattattagataaactctaaattagaaaaaagaaccatatttctcttttgatagtcacataaaaattgaagccatactcattctaataaaaagtaacatgcatagctcttcattgcaaagctcatctattattcataacaggcatatagggtctatatcatttttacagaagtggaaatagcatgtaattactaatttagtttattcattagttttccaaaagtgaaataaagaattttccctttgacttcctacctggtaatttgaaagagataaatttgtgactaaaaagagtacttcacatcatacacaaataattaatgcaactgattgacccaagctagtgtgtgtgatattgtgatataataggaagtatatatttggtttctgaccctggttcctgcccttcagctcctaaaactcttggaatctccagagtgataagagtgtcttttgcatgctaatgaggtgactggtggctggggctggtcaccagaaagaccaaggcaggattagagggttgggattttcacccactcacaatctctggggagaagggaggggctgaaggttgagttgactgccaatggccaatggtttaatcaactcaccatgctgacataacaaagcctccattaaaacccaaaagggcagagtttggagagtttccagatagcagaacacggaaagatgcctggaggataggctcttgaagaaggtgtggaagctccgcactctttcccccatactttgtcctatgtgttttgtttttctttatcaatctgttcgtctgtatcctttgtcttatcctatgtaataaaccagtgtatgtaagtaagtgtttccctgagttctttgggctgctctagcaaattaattgaacctgaggaaaggtttgtgggaacctccaatctataattggatggtcagaagtacaggtgatagcaactggcatctgaagtgggaagggggcagttttgcatgactgatccctcaatctgtgggatctgatgctatttttaggtaaatagtatcagaattgaattgatttagaggaacccggtgtctgctggagaattgcttggtgtgggggaaaaatctccacatacctgatgtcagaagtaactgtgtaagacagaaggaaaaatgctttggagttttttgttttttctccccatctctatttatataggttaaaaatgtggctgggtgcatgcccatgatctgagcactttggaaggcccaggcaggaggataactagaggtcaggagttcaagaccagcctaggcaacacagtgagacccccccgcatctctaaaaaacaaacagagacaaatacataaataaatcagtacaagtacaagcctcataatccattatgaaagtgtcagagtgatgaatgccatgggcatagtaacagttaataaagaaaataatgtgttggaggaatatttaagataactgaggctgctacaagcaaaactacagaataatttcatcatatacatttttttttgtttccaaattagatacaagattaagccttgggtctccctggcagtggagggcgattctgatattcacatataactacccacagggcatggattctgagagatgctgataaaagaagttggtgtcttcttggcatttgtccccaaggatcttccaatacccagagaatctgcatttacacagatcatgctcccttgggagcttctcttgactgccccccacaccctcattcgtggcttttcctctttgatctcccacttcagtcctcacacctgtcaacactgtgcttattaccatgtggagtggttagaagatcttcccagagtcaagacatttccagggtcacccttctcttaggcatttcttggcacgactgtcctgaataaaggaaaggagatgaaggtgatgttgagaagcatctagagggctggagtcagggggaaccggctgaggctgttggatcaagttttagccactggtaaaagacctccaagctgcgaatgctattgccatctgtgtaaagtcgcctccgagattagaacatgccaaagactgaagaaagaggtctaggtagcataaagccatcatgtaattgaagtttcttccgtttccaaggacaggaagcgtgcaaatggctctgcgttctcagtaggggtggggctaagaagtgagcctgcaaatggtagtttgggcgaagacttgtgtgatgcatgcagggactcaaatttagtgtcctctgaacacaaacaccctctatgatccgggttaggtatcgctcctgtgaacgttcaaagaacacctttatattctgaggggacaccgttcatcatcagatcactgttgacggaagccaggtgacagctttgtatttcgtgttttcccctttagtaatgtaaaaatagaagttatttctcctttcttccaatgtaggatttttttttttgagagggtctctgtcacccaggctggagtgcagtgacacaaacacagctcactacatccttgacctcttgggttcagatggtcctcccgcctcagcctccttagtagctgggacgacaggcacattccaccggcccggctaatttctttttaaagtttttgtagagatagggctctcactatgttgcccagactggtcttgaactcctgagctcaagcgattctctcaccttggcctcccagagtgttgggattacaagcgcgagccaccacacccagcccagtgtaggaatgtttaattcctccacttgctatcaaagaaaactgctaactttcttatttcctaatttctctttttctatttgcttctccttaggttctgctcttgggtgctatctccttagttttgagaatatgaaggtttgtttagaaaaaaaaaagcagaaaaaattcactggaagatttcacatttgtatatatctttatgaaatgtgacagtgaagtgttagggtagagatatttgatctgattaccattaggataaaatcaaatctccttaccatgtcttacatgtgtacttgtccaatcttgtctcctataattgtccaaccaacccgttctgttccagcctcactggccttcttattctttcacgaagctcacactgtcctccagagccttgcactctcttttgcctggaatgctctcccagatcttaacatgataggaaaacaaaagacaactgtttgtcatgtctactacagtctcagccccatgaggcagagtccatgcccattttccttccatgcaacattcctggcacctagagagtgactgatgcataatggctggtaaaatatttgattaaaaaatattttagtgtatttcctcccccaaaatatacatacacaacagaggcagttattttgtctatatctttagcacattttaggcatttagtaaatttctgttgaatccatatggaattcttcagattgatctgtgaacactttagatttgaaaaaggagaaaatcataaaactaagggtaatggggagagagcaaaaccaaaggcagacatgggaagattctccttatacaaaatactttttccatgtctataatgaacccccaaattatctggatacttacaacagtggtagcaagggaatgtctcgttaatgcaggttctctattctcctcaattaatttcaggtccttaattgtgcatgacatatgaaacataaagggtgtttatttgctaatcaccagcattaattaattcaaagacttacctgagattctgtttgcgcaataaaaattaaaaagattactcagtaatacattgggagaggtgtaactggggcattaaaatacgaatgtgtgtctaattttcaaacatcataagtattttgaaagcacttatacataatcaattaatatatgttgttaactaaattcatatgaataatatgtgatataaattagtgttttgtattaatttcaagacaattagaaagagaatgtcaccatcactcttttgattcaatcaacagtccttagactggttccttgtaatgaatttaatgggttagtaaaagctgtgttatttgaaattatgtaattttgtttttttaatattttgctcaaatacttttcttattagtgtaaatgactgaagtattatgtaaattttaatactgattatctaaggtatatcattaaaacaaattatgagctgtgatcttgggcaaggtactcaaactgaaagatgttttccttatctgaaaatttagataataataattacctcatagtctgttaagaaaagcacatgtgataatatattttaatgtacaatatgtctggcacatattaaggtctaaaaaggataactgttactgttataccaataaatataataattttgataaatataatagtaatttaaatatattttttccaacatttattttaagttcaggggtacatgtgcaggatgtgcaggtttgttacataggtaaatgtgtgccatggtggtttgctgcacagatcatcccatcacctagttattaagcccagcatctgttagctattcttcctgatgctctccctcctcccatcccctacctccgacaggccccagtgtgtgttgttcccctccatgtgtccaagagttctcatcattcatctcccacctataatgagaactataaactcataattcagctcccacctataaatgagaacatatgatatttggttttctgttcctgtgttaatttgctaaggatggcctccagctccatccatgtccctgcaaagaacatgatcttattccttttcatggctacataatgcaccacattttctttatttagtctaccattgatgggcatttgggttgattccatgtctttgctattgtgaatagtgctgcaatgaacatatgcatgcatatgtcttttataatagagtaatttatattcttttggttatatacccagtaatgagattgctgggtcaaacagtatttctgtctctaggtctctgaggaattgccacactgtcttccacaatggttgaactagtttacactcccaccaacacaacctctccagcatctgttgttttttcactttttaatgataaccattcttactggtgtgagatggtatctcattacggttttggtttgcatttctctaatgatcagtgatattgagctttttttcatatgtttcatggccacatgtatgttttcttttgagaagtatgtgttcatgtcctttgcccattttttaatgggttttttcttgtaaatttaagttccttatagatgctgaattgtagatctttgtcagacgcatagattgaaaaattttctcccattctgtgggttgtctttttactgtgttggtagtttcttttgctgtgtagaagctctttactttaattagatcccatttgtcaatttttgcttttgttgcaattgtttttggcctcttcatcatgaaatctttgcccatgcctatgtcctgaatggtattgcctaggttttcttctagggtctttatagttttgggttttacatttaagtgtttaatccaacttgagttgatttttgtatatggtgtaaggaagaggtccagtttcaatcttctgcatatggctagccagttctcccagcaccatttattaaagagggaatcctttccccattgcttgtttttgtcagatttgttgaatatcagatgctagtaggtgtgtggtcttatttctgggttctgtattctgttccattggtctatatgtctgttcttgtaccagtaccatgctgttttagttactgtagccctgtagtatagtttgaagttgggtaatgtgatgccttcagctttgttctttttgcttaggattgccttggctcttcgagctctttttttggttccatgtgaattttaaaatagttttttaaaaattctttgaagaatgtcaatggtagtttaataagaatagcattaaatctataaattgctttgggtagtatggccattttcatgatattgattcttcctatccatgagtatggaatgtttttcactttgtttgtgtcatctctgatttctttgaagagtgatttgcagttttccttgaagaggttcttcacttaccttgttagctatattcctaggtattttattctatttgtggccaattgtgaatgggagatcatttgtgggtaatttaaatttttaaaatcaaatattttatcactcattatgcattattcttctctgggatagatagagatttcccagaactccgataagctttattttaacctatttacctctgattaatctgtttcacctcccggttgttactgtagtaactggggttattaatagcctcagagctaccaagacttctctgtaaaactgattatctttttcaggatagcatcctctaaatggttatgcaagatttatggttaagaatggaagtagctgattaaataattcaatgagctttactcaactatctacttttcacagcctctattttgtcccctgtggaagcacataacagggcttagctttggtgttgtagctctctgtcagaatacgcaattagtaggtctcatatataaaatttcatttcatcttaatattaatcccaccaaatggaagctatctaaactttaaagttaaaatgactgaggctaacagagaatatgtgatttgttgagggtcacaaacttaacgaattctccaactacgggacaaatgcatttttctcaaaatctgttaccttttatattatatcccagtgtctcatagtgccaagacaaggaaaaaatgaacaattcttagacaattatcttcttttccagggaatatctttccattttctttttcccatccctctcctaccctccccagctacagtcaaacctcaaatataagaaccagagaatttaaataaatgtcacaagaagaaacatcctgaatcgtgttcttcttctggttcctgaaacttccaaacatatcttcagcgttatcacaaagttcagtgatacttaggaataacctagtgctggacaccaagtagatgaccaatgaataatttttgtatttttagtagagacggggtttcacgatgttggccagtctggtctcgaactcctgacctcaggtgatccacccgccttggcctcccaaagtgctgggattacaggcatgagccaccgcacccggcccagaaacagatttcttatctgaaatatcagaaggcagaaaacaacaagagggaaaaaaggctgctaacttaacgcatggggaagcagggtgtgggcaggaaatgcagtgtaagagaggagatttgtacagggcgatggaagagacaatggagagaagacaatctgagcagaagctgtgaggagtagatagatgctggggaaagggactgctaattatggtgttattttaaaactagctttgtgtttaaaattctcattgcaacaccctcagagacctccactgcactgcaaaaatcttggatttatattttgtttatcttctggtgtaaaactgagctgaagcacactgattctactagaagaagtcaatgtcctaggaagacattgacagctgtagggatgttaactgggtcatcttcaccagtaggtggggacattgcactttaaaaattcaagggagctgctgctttcccttctctcctggccccttggcaggtctagatttgagggatcagcatttcttgagggtggtaacccagccactcttttttcccttactcttccttccatgtgttcaaaatatgatgcaatctgagatgtggttatgggtgtttgagaagcaaagaagcatgactggagcaggagttaaagtctgcttttgtttgagaactgaagagctcagtcttttacacgctttcacagataagagattggtactataaaattacatgcttaaaacaaacttcgctgctgtcattctaatgcaagccactatcctttttcacattgagcatcctgccaccatctgcagcattcttgatatttcagtaagaattaaattttattttgcaatcagtattttaaatttatcaggatacctgtatatagtttgaggattaaacaataaagatgtattttaatgaaaacaagagcccttcatgccattcctttcctccactagcattatccccaggtcaatgacttttaatggtaatatgtgtatctttgtgtatgtggggtattaatttagacatcagttatctaattatctgaaagcagataatttagaccaccaacaattttatgtctctggcatccttcttgcaattttattatattactatgtttagttcctctgtaggtaatccctgtatttaaaaaaaaaacaaagaaaacctacacctaagtatattgtatttaaactgtaaaaaaagttgaaatacataaatactgcttagaaaagcaaagtgggatgggaaaagtacaagttattacattttagtatatttcttaaaaatgaatataacaggtagatatttgttagtatgcattacaaaatttgggcaacatagttatgaagtatatttggatatttttcaatacatatattacacaaaggaagaaataaagtactgctcaaatcaatggattaaataacctagttgaaatattggaaagtagatgaacagtaattcacagaagaaactcaaatggaaaacagcatatgcaaagatggccaactttctctataatatttgacacagtaatattatgtcatttcagtttaaataaaattatacattgataaaaatgtgaaatcacgtctttgaggggttactaagaaactgtctagaagcattgttctagaagctgatgtggttttggaagatcaagtgtgaatgtccaaaggcacttctgttgaataaaacgccaagtggaggaattgaagatccctgattgtggaagtatccaactgtttagaactcaactgaaatcctgaatgatagttctctacatgtagcaggaggagcaagtgactcatggaaataacgggtttatttaaataaagatagcctttatgtggacatcaaattcatcaatgaatgtatccatttatttgtcaaataattatttagctcctactaagtgctacatgctattccagataacctagtcaaaaaggcaaatgtgtccctacctttatgagctttaattctagcaggaactaaaaaaagtcacataataaacagacataaaatgcagtgttaggttgtgattcttgctatgaagctacaaaagaggaaagctgagtaagggaataaagaaacaaagtgcttatcagtagtgaacttccatgcaggccatgacaggctcatttcaaaagaagcagaaatatttttattattgtttccttgggttattagtgtcacatgtaagaatagtgcactagatttactaccacagatttttgtacttatacgttattttgaacaaaataacaacgtctagatagttcctttcctcctgcaagaactaagtgtatgtaagtcctctcttttgtaatctagtttatttttttcacatgtgaggatcccagatactattaggatgccttcattgctaattggatcttggaaaatatactttcttgctttacaaaatatatttccttttaagcctcagagtaaattttgaaatgatctacccatggattagtcctctgattttaactagtatcattattctagctgtaaaggacatctattcaaactgtgtacaggtaagattatccagggggtatagtttagagcacccatataattttcaatagattatgtgattttacaagaatctatcaagttaatgtttcaagaatattgataattacttttagacgttttgctgaaaaaatacaaatagacagggagtccatagtaatagggtgggtctaaagttatgtagtctgagtgaggacatgggatgttaagtccagagacaggccatatgcagacagccagaacaatgtctcaaaatctacaaatggctgggcctggatcagtaattcttatgtgaaggatgccagaaatgagcaacgtaaaccttaacagagtctgaaaacacatctcaaggtagaggttagaatgaatccacctgccatcccagcctgatacacatgctagaatgggttatagaaatgggctaacaggaaaaaagtcattgaaatcatggaaaagaccgaaatgaaaaatgtgagataatataaaggtccatatatgttatttatttcagtaaaatgcaaatagacttgacttgtgatcaaaagacagagattgacaaattgaatgcaaaaatacaaattcagattatactgtttacaagacatatgtctaaagcataaaagtcatttcagagattgagtgtaaaagacagaaaggatatatcatgcaaatactaattttgaaaaatgatatcaatttattaatgtaaaaaacaaattttaaggaaaaaaggcattgtagatttttcttcatctctttattttgagcctgtgtgtcattgcatgtgagatgagtctcttgaagacagcataccaatacatcttggttctttatccagcttgtcactctgtgtcttttaattggggtatttagcccatttacatttaaggttagtattgatatgtgtggatttactcctgtcatcatgatgttagctggttaatttgcagacttgtttatgtggttgctttatagtgtttttgtagtggctggtaacagtctttccttttcatatttagtgcttccttcagaagctcttgtaaggtaggtttggtggtaatgaatttgctcagcatttgcctgtctgaaaaggatcttatttctccttcaatatgaggcttcatttggccaattatgaaactctgagttggaatttcttttctttatgaatattgaatattggcctccaatctcttctgcttgtagggttttagctgagaggtctgctgttagtctgatggacttccctttgtaggtgacctgatctttctctctagttgtttttattttttattttttaacattttttctttcattttgaccttggggaagctgataattgtgtgtcttggggataaaagtcttgtgaagtatcttattggggttctctacatttcctgaatttgaatgttggcctctctagctagattggggaagttctcatggatgatatcctgaactatgttttccaagttggttccattctctccatctctttcagggacaccaatcagtcatagatgtggtgtctttacataaccccatatttctcagaggttttgttcatcattggggaagacagtgtggagattcttcaaagacctaaagacagaaataccattcaacccagcaatcttattactgggtatatacccaaaggaatataaatctttctgttataaaggcacatgcatgtatatgttcattgcagcatattcacaatagcaaagacatggaatcaacctaaatgcccatcaatgatagactagataaataaaatgtggtacatatacaccatggaatactatgcagccataaagaaacaaaatcatgtcctttgcagagacatggatgaagctgaaagtcattatccctagcaaactaatgggggaacagaaaactgaatactgtatgtcctcacttataaataggagctaaattatgagaacacatgaattcataaaggaaaacaacacacactggggcctatcagagggtggagagtgggaagagggagaggatcaggaaaaataactaataagtactaggcttaataactgtttgacaaaataatctgtacaacaaacctccatgacacaggttacctatgtaacaaaactgcacatgtaccccgaacttaaaataatagttaagaaaagaaaacaggccgggcacggtggctcacgcctgtaatcccagcactttgggaggccgagacgggcggatcacgaggtcaggagatcgagactatcctggctgacacagtgaaaccccgtctctactaaaaatacaaaaaattagccgggcatggtggtgcccgcctgtagtcccagctactcgggaggctgaggcaggagaatggcgtgaacccgggaggcggagcttgcagtgagccgagatcgcgccactgcgctccagcctgggcgacagagcgaaactccgtctcaaaaaaaaaaaaaaaaaaaaaaagaaaacaaacaaacaaaaagcaaattaaaaataaaagctatggttgaatcaatgatgacattgaggaataaaacaagcattaggatcatgacattagcacaaagccattcatgagggatctgcccccatggtctaaacatctcccattaggccctgcctccaacattggggatcaaatttcaacatgagatttggagtggacaaatatccaaactgtggatgggaatgcatgtggaagaaatacttaatacaattgcatttaaaaagtagagagggtaaaatatgctaatggtactagagatacggactgtatccttcactcaaagtggtaaaacatcaataccagtagactgtgataagttatatgtatatattgtaataagtacaaccaccaccaagaaagctatatgaagcaatgtactaaaaaggattaaaaagtatgagtgtagatacaaaagttcttcctgagaacttcaaataagatagatatgcatatggtgagtagggctgaagtcttgacttctatgcctgaaagtaggcattattggctgggaatttaattcctaagtgggaaagaaaccaaaagtgctctatggaggaaagacagccaaattttgactttctgcttctggctaggagctgaggttgggctccccatgattttaaaggaggttgaggagaatgttttcaaacacttgtatgctatagatataaggaagtgagaagacacagaataactttctcaaaaggaactgaagcaaataaaaaacaactgtcctgagaagattgttattgttccagatattacaacaggacaataaatctgaatgatcactgaagaactgggattttgattggaagcctgatgggctgaggtggagtggctaaataaaacctctggacagggacagtggagtacagaaaagaagaggagggaggagagtaaaagagatgggcaatgctatggtttgaatgtttattttctctgaaactcatattgaaacttaatccccatagtaatagtattaagagggctgtaaatccaactatggtatttgagaggtggcacctttgggaagtaattaggattagatgaggtcttgagggtggggcattgagaggagaaacagagaccttgagccatacccctttgccctcttgtcacatgatgctctgcacctcatcagaactcagcagagggcccaccaataagaagactctcaccagatgctggcaccatgctctgggacttctcatcctccagaatcataagagatacattttgtttcttcataaattacccaatttttggcattctgttacaagcaacaagaaacagactaaggcagaaaattggtactaaaaagttgggctgttgctaataacaaatatctgaaaatgtggaagcagctgtggaactgggtaatgggtagaggttaaaagaactcaaaaaggcaggcgagaaaaagcctgtattgccttaaatgtcaattctggtgataaagggtgattttggtgagggcttagaagaagtcaagaagactaggaaaagtctggaactcctttgtgatgatttgagtggtcaggaccagaatgtcaatagaaatatggacagtaagggctgttctgctgaggtctcaggtctgaggaacaaggaattggaaactggagtaaaggccatccttgtaataaatgggtgaaaaacttggctctgaattgtgtctatatctgatggttttattaggctatatggcagaagaaatatctaagcagcaaagcagtcaggcagctgcatggctacttttaactgcttacattaaagctgtgagaggtaaaaaataacttaaaggtggaatttataattaaaagggaagctaagtggaaagattaggaaattttgcagcctggccctgaaagagcattttcaacagaggaaaccaagggtgtgtctgaaggaatgattgttaaggagggactgattgataaggagaattgtatgaatagaataaagccagaagctattcatcaagacaatgggagacaaacactgaatgcactttagagatcttcaagtctacccctgccatcacaggcccagagctctaggaggaaagaatggtttcaggagacaggcctggggtgtcctccatgggcttgctgcccaatgccacctcagggcagtgcttccctcatcctggttgctccagccatagctcaagtggccccagatgtgactcatattgtagctgcagaaggcacaagcagtaagccttggcaatgtccacatgcatgtggtgctatttctgcaggtcttcagaatgcaagactagtgggaaggcatagaaatctccacctagatttcaaaggatgtatcagactgcctgggaacccaaggagaaaactgccacaggggcagggccaccactgtggggaaaagcaagagggatcagattgttactgtgtctgtgtagaaagaagtagacataggagactccattttgttctgcactaagaaaaattcttctgccttgagatgctgttaatctatgaccttacccccaacaccgtgctctctgaaacatgtgctgtgtcgaactcagggttaaatggattaagggttgtgcaagatgtgctttgttaaacagatgcttgaaggcagcatgctccttaagagtcatcaccactccctaatctcaagtacccagggacacaaacactgcggaaggctgcagggacctctgcctaggaaagccaggtattgtccaaggtttctccccatgggatagtctgaaatatggcctcgtgggaagggaaagacctgaccgtcccccagcccgacacccgtaaagggtctgtgctgaggaggattagtataagaggaagacatgcctcttgcagttgagacaagaggaaggcatctgtctcctgcccatccctgggcaatggaatgtctcggtataaaacccgattgtacgttccatctactgagatagggaaaaaccgccttaagactggaggtgagacatgcaggcagcaatactgctttgtaaagcattgagatgtttatgtgtatgcatatctagagcacagcacttgattctttaccttgtctatgatgcaaagacctttgttcacgtgtttgtctgctgaccctctccccactattgtcttgtgaccctgacacatccccctctctgagaaacacccacgaatgatcaataaatatgaagggaactcagaagccggcgggatcctccatatgctgaacgctggtcccctgggtccccttatttctttctctatactttgtctctgtgtctttttcttttccaagtctctcgttccacctaacgagaaacacccacaggtgtggaggggcgacccaccccttcaaccaccaagagcctctgctagggcaatgctgagaggaactgtggggttggaactgctacagggagtcctccccagggaaatatctagtggtgctgtgacagtgggactgccaccaagactccaaaactgtagagctaccagcatgcagtcccagcttcgaaaacccaaggcacctgactccaacccatgagaacagccatatatgggctgcaaccagcaaagccatgagggcagggttgcctgaggtcttgggggcccaacttctgcccctgtgtgctcaggatgaggaacatggagtcaaaagacattatttccagctttaaaatttaatgtctttccctgttgagtttcagacttccttgaggcctgttacttctttcttctggcccatttctcctgtcccagcattgtatcttggaggtagataattggctttagtatctcaggctcacagataaggactttggacttttggacttttgagttggtactagagaaagttaagactttggggctctggagataaaatgaatgtatttgaatgtgagaagaatatgagttttgaggctgcaggggtgaaatgctatggtttgaaagtttgctcctctaaatcttatgtagaaacttaatccctattgtaacagtataaaagggtaagaaaacagaccatgatattttaggggtgggagatgtgagaagtaattagtattagatgaggtcatgaggatggggtgatgggttactaagggtttgataagaggagaaagagatacttgaggtagccctctcagcctgcttgctatgtgatgccttgcaccacaatgggactctgcagagggtccccactagcaaggaggctctcaccagatgctggcaccatgctcttggacttcccagcctccagaaataaattttgattctttataaattacccagtttcaggtattctattgcaatcatcaggaaattaattaacacagcaaaatcgacatctagaatacaaaataatcccagcactttgggaggccgaggcaggcggattacctgagttcaggagtttgagaccagcctggccaacatggggaaaccctgtctctactaaaaatacaaaaattagccgggtgtggtggtacatgcctgtaatcccagctactcaggaggctgaggcaggagaatcgcttcaacccaggagatggaagttgcagagtgagccaagattgtgccactgcactccagcctgggcaatggagtaagactctgtctcaaaaaaaataataataatatacagtaattggagatgaaattaatttaagtgttctggtatatactatgtaagtatatgaagtataaataagtagagtgcagatgacaccaataacaatgacttcattgctattctgtctcagtgaagaaggggtcctgtaggtatgattaattattctcttaggtgtgtcttctcaatgccagcaaagctaggtgtgggtgaaaaaaataccacctagtcttttttgttaagtgactataaatatcatcagatccctgtgcttccctgtctctatccccagggattcaatgacatttatacacttggttcccaggtgagattttaattaataaactaatctcatgactgttagcaattataattagatattctgtcaagttcctaattctcacatcttcaagtcctgtaatttggtatgaaggcactgcgaatttggactttgagctaacaagatttagacaggatattggccttgatctgaggctgtaatggaatgagactttggggggcccttgagaagggattaatgtattttacatttgagagggacatgaattacaggtggccagagggctgaagaggtgagaaggaaagcagaattctaagatggcccccaggaatatctatcaccccctgttgtacataccttataaaattattttcctttaaatgtgggtggaacctaccgagaccagcttcgtcagggagaccctaacccagcagcgctagaggaattaaagacacacacacagaaatgtagaggtgtgaagtgggaaatcagggatctcacagccttcagagctgagagccctgaacagagatttactcacatatttattaatagcaaaccagtcattagcattgtttctatagatattaaattaactaaaagtattcctatgggaaacgaagggatgggctgaattaattgcagcaggaacatgctcttaagacatagattgctcatgcttttgtttgtggcttaagaatgcctttaagtggttttctgccttgggcaggccaggtgttccttgccctcattcccgtaaacccacaaccttccagcttgggcgttaaggccattatggacatgttacagtgctgcagagattttatttatggccagtttatggccataaactgggccataaatttggggccagtttatggccagattttggggggcttgctcccaatagtaaccagtaaatttaatggtatgatcactactgtgattgggttatgttttgactgcaattagccttatgaaaaggaaattattgtaggtgagcatgaactaattaggtgagcccttgaaagggactgaacttttcttgaagagggagattaaacatgagaaagactctgtattactgactttgaagatgtagagggccatgtggcaaggaactgagagtggtcactgggagctgatactgatccctggctgatagccggcttgaaaacatggacctcagtcatacgtggaaataaattctgtcaacaggcagtgagcttggaagaggactccatattcaaatgagaattataaggtcagcttgtgacttcagtcttgtgagatcctaagcagagagcccagttgagctttgcctagacttctgacctagaaaactgagataataaatgggtgttgttttaagctgcaaagtttctactaatttgttatgacagtggctagaaaattaatacaatatgctttgtttatttaaattttacatactgcaccataagcacctttgacataaacagaatgcttaaaattgatatacctttcacatattaattctttactttttcttagtatagtctaagaatactttcctgtacggtttctttctttgttttgttatttaaactcatctcaccactttttaataaaataaatatttactttttttttctatatttttgttgatggctttcatgaaacttcggttcttgtcttcttagtttaaaagaatttaaacaacagacacacagcaaaggagatacaacatagagcaatttcttgcaaaggagaaaggatactctgaaagttaggtgcagaatcaacagtacaccccaagagacaattcagggcaggttgcttgtgcgggtgagacagtgttgaatgttactggggaaactccctttatgggagtcttacatgattattcataagggggtgggaagatgtgttactagcaagcatgttctgggtggttcctcctcagttctgagttccttctcatttaaacttttaatctgcctcagtataatctctgtatgtgtgtatgtatgggctctttttactatcccactaactcactaattgacccaacactatttttagtaatttttcctattccactggattaaaagtttgctttattatgcactacattcttaatttatccaacataaatgcaggataacttgttctatccttgaaagcagtcccagtatgatgttctttagagaggccagagcaaatttccccatactccatttcaaatacttcaaattatattgcaacctcttgaaaaatatcaaattaggattgtatttctaacaccaagaaaaatgatttaaaattcttttaaaatagcttcttgtcctaaaaatctcaccataatttcctcatcactatgctgctttctctttcattccatattggtgtcatgacaatcaagtatatttcaaaaaacttgtttccggaccccttacatcccactgagttccattcctcattagctacagcccattaccctacaaatttggatagactccagaagagtagagtgggcccttatgtactttgaagaagtgaagaatataacctgtaacattgaaggcttcttagaaatatgtttgtctcccatcccaaaattttctcaaagggtttgcgacttcctagaaatgtaatacagtggtcctcccttatcgatggtttcactttccacagtttcagttactggtggtcaatcaatcacagtgtgaaaatataggtgtttagtacaataagatattttgagaagaggggagagagaaagagacagagaaagagagagagagatctcatttacataacttttattacagtatattgttataattgttctattttattattagttattgttgttaacctatgactgcacaatttgtaaattaaactatatcatatgtttgtatgtgtagaaaaacatagcatatacagagtttggtacatgccttcaggcatcctttggggtgccttgcaacatatctcccatggataagagggggctattgtaaacaaaattttcaatttcattaattgtggcataaattaggttctgtttatgtgcagccaatatcattccacagttgtcctttttttggggcactatgaacatgttttaattgtttagctttataatcatttgtaaacatctattagagtacctctccttatttttatcaatagttgtttttgtataccgctcttgaaagttagaaacattttgttaataaaactgtcttattactatttagattaaagcatcaccaaatccatgtattttgtctggaaaagtgacacaaattgccctgtccaagaaagtggtatcattgtttactaaacttctttctgtccttaagtaaatttctattcttttctgtggattgcacacatgactgctttgatattttgtatatttattgctcttttcaataattttttttctggaatggattcattgacctaatctgccagagagaattaatgaggccccacatcttctcattagttggagaagaaagtatttaatggtttaacttgaacgtgacttttgtgaatcttttttttttttttttttaaagcagaatcctgtatttggttacattctggtctagtgaccacttccttcaggtaaagcaagcttccctgtctggaacagccaggcatgtgataaaaaatttcctttgtggtcacttagttattattcctcttgtcttgagtgtctgggctgctattttcatgtatttacatccaaatgaagtctttctttccaactttttatagtatgttttgattcacaaaatattttagccttatctacaatataataatttctcacaaatgcaaagaatataggtttgtacagttttgaagtaatattggcaaaagagtatgaagcagagtgcccatatttaaatataactttcaacatgttagtctttctataggtgttttcaggataataaaaattaatttgattgatatagacttgggggcaatatatgagaaacaggctctgctctaaaggataggatgagaggtgggcagggaggatttgtatggtttgaattccaggcacacacgctaactgctaatttggcatcatccaccaggttgaatattttcatgaaattctgtcttacatctctgctaatcctaaaacaaagaatgaggatcatttcaggtgagtctaagtcaggagaaactattaaaattgttatattcttcatttaatttttttctatgattattttttcttctttttatactaattagaataggccaaactgctgcaacaaatagactaaaatgtgtattgtggctgaaatatagtagaagtttataactcactaatgtagcagaaggaggatattgaagatttgtgagtcacttttctccaggtggtgattcagaattccaagctcccatagtccaatatggtgcctttcattttttttcctgagaaaattaacacattttaatttttcctcaagaagggaggtacaagagtgatcaattgtgatctagaagattaaggcaagaaagttagtgaaatttgctacagtgtctactattatagttgtcattatgactgtaactaatatttgtttccctccttcacaagccattcttgattcccctcatcctctgaatttagtctagtttgtttttctgttttggtgacagagacaactattccagaagggtctatgttactatttactctgttcttgaattatgattgttttagtgtctactgacagacatgaccatgcatagaagcactaaaagactattgtattttcatctgggatagtagtctctgtcactaaaccagaagaacaacctagtttttagacctgttcaagcttggttccaaaggaaccacttctgctgcagatggattgtggttggtatccccaaacttacgactccatggatttatagctcttcgcatcatatggtcaatttaaggcacatggtcagtgtgctaagtgcctatcaggaagaaatgaacacttggtcatagttttagaactatgaaaggaaattaaatcttgggactccaactcattaagcctaagggaaaagttaatctgggaacggggttgcgaaaacccgcctccccctttttggttcctaaataagatggctacaaaatgaaaagctacatgcctccctcatattttgtccacaaggaaagtccttgtgagctgcaagatctttactctaaggtgtttctgttaaaattttaccatggcaatgtaaattggtagcttatctttacaggtgtagtcacgcccctgcccagaagacacaaatgcatatcttttttttttttctttttttttttttgagacggagtctcgctttgtcatgctggctggagtgcagtggcgcgatcttggctcactgcaacctccacctcccgggttcaagtgattctcctgcctcagcctcccaagtagctgagattacaggcatctgccaccatgcctggctaattttttttttttgtacttttagtagagacagggtttcaccatgttggccaggcctgtttcaaactcctgaccccaagtgatctgcctgcctcagcatccccaaatgctaggattacaggcatgagccaccgcgcccggccacaaacgcatatctaattgttccccttcccccgttttgtctatgtcatcttatgtaaaaaaaatgcagattaactgagccagacaaaggcatgaatgactatttttccttaccctcctcttacatgaaaattgtgtacttctcaatatccctaccctttccccttaaatttagagccctcaaaattatcttcggagaaaggtatagacctgtctcctgggtgcttattcttaactttggcaaataaacctcctaaaatgattgagacttgccatttttctcgattgacagaacacatgagttcatgcaaagttactgttggagaagttttcctgtggttgttttttggaacatgtaatatgaatgaagtgatcaagagtttgagctgtgacttacactttaggctataatagagtaattggtgcggttaagacttcatctctcctgggcagctttcttgagctttaggagactgactcacaatggagctgaggcttcttctgtcccttgctactgatctgtaagtaataaaactgcttcacataatttgtgtgtgagtgtgttctgtttcaccagactcagataaacaggtagccagtgcatggtggacataaacagtagctcagaatgcagtgggaagaagtatctggacctcttttcctggtggttggcatagtgatgatcttttctattctccatgcagtggaagtcctccctttcctcccttggtattggtaattagtaaacctgcttcataaactgtgattaatatactaaaatctctaatggaaaaggtagacaacatgcaagattagacagtttcagcagagatatgaaagctttaaggatgaatgaaatggaaataaaataaaaataaattaacaaaaataaagaatgcatttgacaagctcatcagcaaatgtggtacagccctgggaagaatcagtgagtttgaaatagatcaataaaaattacccagagtgaaacacaaagagagaaagagagtaaaagtacattaaaaaaataagcctggcacaatgtttcacatctgtaatctcagcactttgggaggctgaggtgggaggaatgcttgaacctaaagagcagcctgggcaacataaggagaccttgtctacaaagagagaaaaattaagtgggcaagcatggtgctggtattcccagctactcaagaggctaagacgggaggactgcctgagttgggggcgagggtgggggatgaagtgagctgtgatcgcaccactgcattccagcctgggcaacagagtgacaccctgtctcaaaacaaacaaacaaacaaacaaacaaacaaaggtgatgtaaccattcaatacagcactgcagctcttggatgctctgttttgtttttcccctgctcttcttttctctttgtatttcacattgggtaatttttattaggtatcttattgaattagtttgttaaaagataaacacattatttcggttggctttgcttttttaacattatattttgaaataattgtagattcaaagggagttaccaagatagaacaaaaagattctgtatagccttcatccagttttccccaattgtaacatcttacataactaaagtgcaatatcaaaaccaggaaattatcctgacatatatagtcaaacgattttcaacaggagtgccagggccattaaatgcggaaaggacagccttttcaacaatggtgctgggaaaactggaagtccacatacaaaagaatgaaactggactcttaccctacattatagacaaaatgaactcaaaatgaatcaaagacctaaatgtgaaaactaaaaccataaaactcttagaaaaaaaatagggaaaatcttcatgatatttgattaggcaatgatttcttggatataacaccgagggcataggcaagaaatgaaaaaaatatatataaattggactccatcaaaatttacaacttctaattgaggcatggaaaactaaataccatatgttttgatttgtaagtaggagctaagtgggtactaagctatgggtactcaaaggcatacagaatggtataaaggacaatggagagtaagaaattggggaggatgggaaggagggtgaaggataaaaaactacatattgagtacaatgcacactactcaggtaacaggttcactaaaattccaggcttcaccactatacaattcatccatataacaaaaaaccacttgtaacctaaaagctattgaattaaattatattaaaattaaaaaattattattgagcatctactatgtgttcaaactattttagatgctatatatttgccacttcatttaatccttggcattactctatggaatagataatattctcattttgcagttaaagaaactcatactcagagagattaacttggatttatgagcaatgttgacattataaagtagaggcaggaagaccagttaggatgcttttgcagaaattaacttgagtggaattgtcggtctgtgagaatagaaaatgaatcttttgggaagattctacaatgttattgtttttgcataagtgactttttcctctactccctcttttcacatgtaaaatgtagatttactgaggctaatcagactcacaagaatgtaaccacttgtgtcattgcctaccttccctccttttttttttttttttcctctctctttcccttcctgcttactctttctttttaaacattgaagttctcaaaaccctctttggaataagcattgatcacagatgctcctgtgattcgtgtttttcccaggtgcatcctgaaccttggcaaaataaacctctaattgattgagacctgcctcagtcacttttcggcttacaccaggatttctttctttttaaagcctgaatagaattccattgtgtatacatacattatctttacccattcatctgctgaatgacacaggttgatttcataccttgactattgtgcataatgctgcaatgaacatgggagtgtggatatattttcaacctactgatttaaaatcctttgtctgtatcctggaagtgggattgctacatcatatggcagttctattttaactttttgaagaaccttcataatgttttccctagtggccatactaatttacattcccaccaacagtgtgcaaatgttcccttatctccacgtccttgttaacacttgttattttttgtctttttgataatagtcatcctgaaaagcatggattgatatgtcattgaggtttaaattgaatatcttaagttttcctatttgaggatatgagtagtccccccaaaatattactactaatgttgcttttttgcatgaaccatgaccttgagctgagctggacacttgaattcttgagtacttggacatgagcttaaataggactgaaatattttttacatacctgaatattagttcttctctctactggtaagaacttgtagaagaagacattataaagatctcatagaaagatatttaaggtttgtctgggaatgaaggcacatgatgactacaaatctagaagctggggaagagttgtctctggaaatatcccaggcattactagggaaccagaagtagagacgaacagatatgttgcaaagagtgacatgtgtaggttagctctgggtgatgaaatcgtcagtggtccagctgaggtgatgcatggatgagattgactggaagaagaaacctgtagaaacagatcaggaaacaaagctccgttgtacacacgtccatagcaggcagcctgggttttcatcccagtcttcttctgttttcaagggccatttccatactgcatgagaagccatgagactggtgggctctggactcctgtgccagagatcactcaccttccccatttcccccaagtgtcccaaatgccttgtatcatctgattttctatcttcctgctaaagcttttcccatactcctagtccttcaccctgcggtatcctccaagtccttacctgacttccactatggagtctccccatggttacttgcttgaaggaggcactgtttgagcacagcctctgaatgctacagactctctcttcagattttctaaattgtcattttaaagagataactgtttaaagagaaaaggcctaccttatatgtgtcatgaaaaattcatgtaaccggttacctaaaagttgatataagagaaatatgtaagtagcttcacaaggttttgaaaaatttggagataattacttgataaatttttattaaaggaaaatgatattctggggctgtatttctgttaccactggcattaaggaggccacagaacctttctgactctacagtgtttcttgattctggaagtaattgcaggacagagtcctggataacccttctggtgacaggatgactcctgtgtttacattcaactgcactgaccaagcacagattctaagagatgctgaccagggaagatgatttctcccttgattccacaaagaaggagtccacaacctttttctgccctgaaagaagagacaatgtgccctggggagtctccctagtgtaaccttgacccgtaataacagcagtgtctttatcccatcttcccacatggggtgtgtgtggtctcatcctaagcgctctgtccccatcagaggccgggcaggtgatttgggtgaggcattcagaatcaggatgcttgtctgagttgccttcctctggccaggccaatagtggctgccctgagtaatggagcagggataggaacattgcaaagaactgtagagaaggctggatcagggggacacaactggcagaagccccaaaccaaagccttttagattaggtgttttttttttgttgttgttttgttttgagacagagttttgttcttgtcccccaggctggagtgcaatggagtgcaatggtgcgaactcagctcactgcaacctctgcctcctgggttcaagcgattcgcctgcctcagcctactgagtaattgagattacaggcatgcaccaccacactcggctaattttttttatttttggtagagacgggtttcaccatgttggccaggctggtctcaaattcctgacctcaagtgatctgcctgccttggcctcctgaagcgctagaaaattacaggggtgagccactgcgcctggcctcagatgaggttttagccagtcagaaaatggctctaagctgacactttcgttgctagttgaaaagtctgtgtggccaggtgtggtggctcacacctataatcccagtgctttgggaggccgaggtgggaggattgcttgaggccaggacattgaaaccaacctgggcaacatagcaaaaccctatttctataaaaatttttttaaaaattagacagaatggcggtgtgtgcctgtactcccagctacttgggaggctcagacaggaggatcacttgagcctaagaggttgaggctgcagtgtgccatgatcatgccagtgtactccagcctaggtgatagagccagaccctgtccctaaaaaagaaaagaaaagaaaaaaggaaaataaaaaaaaaggaaaagaaaagaaaaaagtctgtttgaagaggcccatgagactggggagtccctaggtttgacgtagactttgcctcacagccccagaataaacctgagggaagtttctccctttgaacaggaagaaggggtgggccagaggcctctattccgagggacgctgaggtggggactgagaggacattgagggcatcttcaggtccctctctgcctattctttcttgcccccagttccgttctaggtctgagtttgatgttcctcctttatgcttccatcgcaccagtggagaccctccttagactgggggttaccctgatcctgagtacaccactgctgctagaagcccagtaacaacgttcccagtctcaggtgatctaaatctatgcacagaataatacagaatattagagtggctcaatgctttcatgtgccactattgcaaacctcttgctaccgtctcttccctgtttctttttacctggtaaacatattctgcttttagatgctctctatcttctactttactaatatacagggaagagtgggaggaagggagacaagaagagaggtggagatatttattgtcttggttaggattaccagtaatgtttgtcaggcattgttttaattgctttataaccattagtactatccctagccatgggcaacgtaagcctgataagtaagaaatttatttataaaaacacattggtacctctgccattttggatttgatgtttagggctggcccaatatgacctgtaactctaaacatttgctccatcattaatacgattcagcccccaggaaattcttcttcacagcttttgttctctatcttcaaaactaaatgtgactgtgtctgaatactgtaaaatttgtgtattgtgcctttgctcatatcagatgcacctgtttcatggttcagggaggatttaagcagctgaagaacttacaagagaaaagtcaacaaatactttcactcgaagagcatgaatgcaataccttcttgcataataaagaatcacttgccagtagggctgggtgtcaacttttttttttcttgttcctcctattagcttgatagttacacataacagtggaggaggcttttgtaatattaaactagtcatattaatgttaaatttgtatatgtgaagatctagatgtaaaatgcataaaacatgatccacattttgcaaagagaagcctgggggtgaaaaggagttcagtaatttgttgactctcataaagcacattagtggtagaactgcaactcaccatcatttccttctaagaactttgctcttctcaccaaaacttaaggctcctcagagtgtctaatagaagtgaacatttctgtgacaattttctgttccctgaaatatgatcctcacttaatttgccctactaaaactcccaagtataagaacaataggttgtaagatgtctactcttgaatcacatttgtcttttgcttcttaaaacccctaagccattcaatcttcagctattcagaaatcttcacctcaaatgttcatctagtgcaatttgaagaagaaacagtgccaggcattggagtgagaatcttcacagaaaaatgtctgcccagaggcagatgaggtccttcagctccagtgctgattggttcctttcctagggactccccaatcctaccacacatggaaacatccagaggtttttattctttccggcaggtacataagatccattaggtttgagctgtgttgactaccactgctttttccttggtctcacttatgtcttggaagatggctctgcagatccctggaggcttttgggcagcagctgtgaccgtgatgctggtgatgctgagcaccccagtggctgaggccagagactttcccagtaagtgcagggcagctgctctcgagagccaccactgtgggaacaggctctccttgggttggagtatgggggatggtgatctccatgatctcagaacacagtcttttatcaccatttattctttttgggaaatagagctatgttgcatttttatttccaccttataatgggtgaggtgaggataatccaaccccaatcccacaggtttaagcctgaaggaggagagaggaaagaggagacaaagtgtgcattcactacctgtgacaggacaaaatgaccatggcactccacggttatgcatttccccaaagatatgcatttccccaaagacacagtaggatttttctgcactgggaaaatgtaaggcagcaatggtgtctgtagtctctgtattggaggtaaaggagtctatactactgactcgagtggagagtttgtggaggcaaactcttagtactgagggaaggtgactggatgaccacagacagggagtcttactttgggtttcactgatttatgggcaaaaggtgacttgagtgggattcagggacctgagttgatggtggactgaatttagtatgataggaaggaggaagtaaagaagggaaataatacatattgagaaaccactccattcagacacaggacagtactttctataaatcctctctcactcctcctaacatcctatgtgtaggtatcatgattttccttttatgtaattatacttgtgatatggatattctgttaagtaacctgcccaagctggtgattgactcagtttaattggaccctatagaattcaaaagcttgggctctttccatgaataaatgtttccttctaggactccggaggtgtaggtcctttctaacacagaagtgagtgaacctcacagggcacttgggcgggtatagcagaaagagagtaaatccaggcatgggtttacttggtctcttgcccagggaccaagagaatacttacatcaggatgagaacaagcttaattcctgaacctttctcgttattcccttgaactctcaaatttatgtggataactctgtctctgagattcccaagagctccatggaaaatgggatttcatacgagaacgccctgatctaagagcagaggtcaatgtcgaatcggtccgactgccctcttcacttggttcacaggctcaggcagggactgggctttccctcttacctccctaaaggaaggcagattcccgaggccctcagagagggcgggcagggctggggcagagatgtctcgaggatcccaggtccggagcacgaggcacgggcccagccaagaactcaatttcgcgtggacgggtttcgcagctgctggccgggtcagggcagcggctgaagggtgcggtccggctgggggctggggctagggccgtgctggggcctgactgacccgccgtgattctccgcagaggatttcttggtccagtttaagggcatgtgctacttcaccaacgggacagagcgcgtgcgcggtgtggccagatacatctataaccgcgaggagtacgggcgcttcgacagcgacgttggggagttccaggcggtgaccgagctggggcggagcatcgaggactggaacaactataaggacttcttggagcaggagcgggccgcggtggacaaggtgtgcagacacaactacgaggcggagctgcgcacgaccttgcagcggcaaggtgagcgtcgtcgtccttccgcggggctcacccttggccggggcccgagtctcttgcgcacggaggggcgaggacggcgcggcctcaaggaccgagccctgacccatcccagggtacaggaaggtagcggggatttggaggctggggtagtatcggaggggcggggatctagggcagagcagggggatgcacaaaagcatcccttagttccctgcagggttgggttaggctgcccagtgtgtccccagcctccccgtccatcggccttgtcctctgctctgcatgttcttgccttgtgccttatgcgtttgcctcctcgtgccttaccttcgctaagcagttctttctgcccgaatgcccgccctcttcccctgcccgtccgccccactagcactgccccacccagcaaggcccacttgcacagctcgcgccgcaggaagcttcaggcttggcctggtggagttagggctgctccacaactgcgcgcagggcatccagcaattacagttgtgaaataagatattttaacttttggcttcaaattattattcatcgtaattctgttttcttaaacggctctcattcatggcggagctctttgaggtgagagtgttttaatcattgcatgcctagtacctgactcgtggaccggcatgtggtatgagctcaatgatcttctgttaaattaatgaataaatgtactcagctgcccatccacttaggctcaagggaaagcagaggataaatagagccttaaagatggactttatcaattattttctattattttgcttaatgctgtaaactcttattgacttggatcttagtaaggtttgtgaatgcagtctggggaaaaaggtgtttgctgaaaataaaaacaacgcttgaatggtgttataaggcagttttaatttcttagaaaagctgaacaaatggcacaatgaaaagagcagaagctttggaatacatagattgaagccactaaattattgaataaaaatagtttcaggttgcttttggagtagattttctccctccccccatcactatccacttcgggcataaacattctgaacgtcaattttacccacttagtgagcacttatttctagacaattgccttagcaaacaccatctaagttatgtcatttaatagcacagttacctgtgcattagagattagcattgccactttatatatcgtaatattggtacatgataaacactttaagtaatcaacccacagttatgcactaggacctgaagcctcccccaaatacacagcattcttttatgttcttcaatactcgtctacacagcctaagggaagtaaagccttgttaaagccaattttgacaagaagcagcaatgggtctattcctgcctgttttcactgttaatgggacaaaatgatactttcaaggcattgaaaattcactgattaatcaatccctagtctgaccccagtgttatctatgcaggttcacaaaacttccttgccttcttctgacccacatcctaatgctgtcaattatttatatttttgccatttcaagtctatttctataaaagttattctatcatttttctcatgaatttgtgccctctatttttactttcagtcttttaagatgaacaaatcttgtaagtccccacatagctgactgttatttcagtcagactccaggaaggagggcctaaagaaaagttcaagtccaagcagaaaccaagattccttccagacaatggctcatgagtgccatttaattggggtgctacctgctgacctcagcaaatcccagctatatgtatatgtttgcattacaggcacattcacccaggccaacctctgcatggatctcagaatatttcctatggagaacgtacatgataatgtctgatttcagaacaagaaagtaattctcaatagcaaggggatggagtagggtaggcagctagtaattacactatcttgagggttaaaaggaaattaagaaaaagcaggaaaatgagagaacatattaccaagtaaataaagcatacattaaatatttactataattttacactaaagaaataaaggaaatgcagtaaaatggccagagaggtaaaggttaagatgtataaaatatgcagggaaaggtgtgtcatttttgaccatgagcagcgctctgagaagataaaggaattgagttatgggcaaacatgatgtttgatcagtgttagtttttttcaaggcctgcctacttttccttcaaatattacaaacttttgaaataacattcaattttttggtctctgttactagattgcaagttctataaaggcaggaaccagggtttgttgtttatttttggattctcagtgattgtcaaatttatatttgttgaaggaaccttaatccaagacttggactccaggtatctttctattctggttccaaggagggaccttcctcacagcaggcgtgctgtgtggtctcacatctcactcctatatctttccctgtctgttactgccctcagtggagcccacagtgaccatctccccatccaggacagaggccctcaaccaccacaacctgctggtctgctcagtgacagatttctatccagcccagatcaaagtccggtggtttcggaatgaccaggaggagacagccggtgttgtgtccacctccctcattaggaatggtgactggaccttccagattctggtgatgctggaaataactccccagcgtggagacatctacacctgccaagtggagcaccccagcctccagagccccatcaccgtggagtggcgtaaggggaaactggtttccttttactgtgggccccacaagacaaagggcagagctcccgctgatccttcccatcccatctcttgtccctgacatcactactgagctgggaatcacaggagactagagcacctgttgcccatggcaagcacatcagatgaatcctgatctctttgtctttccagatactagggagatcactttccacatttgtgttagtccattcttgtactgctacaaagaaatctctgagactgagtaatttataaagaaaagaggtttaattggctcttctcactccactataaagaaatacctgagaatgggtaatttataaagagaagaggtttaattggcttatgattctgaggctgtaggggaagcatagtggcttctgcttatggggagacatatggaagctcctaatcatggcagaaggaaaagagggagtgaggtgtctcacagggcaggggcaggagcatgagagagagggggttggtgctacgcagttttacataaccagatctatgagaactcactattgtaatgacagtactaagggagatggtgacaagaatctggtctaatgatccagtcacctcccaccaggctctacctccaacattgttaattacaattgaacatgaaatttgggtggggccacagaatcaaaccatatcaacactactaaagccccagaaccagctctgacagctatgagagactgacttagggctggtgactggggccttagggtttaaggttatggatgaagtcctgaggggcaggggtgtgcttcttcctctccctcacccacctattgtgtccaagacctactggctggtctttctcttccctagggtggtcagactggagaactagtgtcccctgacatctccacctcctgtaccaaggacattatggggtgtggggacaaacactcacactcagttctgctccttaggggctcagtctgaatctgcccagagcaagatgctgagtggcattggaggcttcgtgctggggctgatcttcctcgggctgggccttatcatccgtcacaggggtcagaaaggtgaggaaccccaagggaaaatggggaagatgagctgtgacccagaccctctattcagagaggttctgtctctagatgtagctctttcctccttaccctgagaggaagtgcgaggagacaggacaagattggaggaggcattggaatctgattttactgggtgaatggtagcgctgccagagctgactgatagagcttattccagggcgtccttaccgttcatcatcgtctcactggctcctttctaaaagcttcctccattatgagggtcagagcctcggcctccttgtcttctagtgacaatttcctttgttttgggggattttaacttagggtgcttaaggacttaaagaacatgggagggaagaggatataaccccaattaaactacatgtgtcattttcctttggggtaagatagtggttgtttgtttaacaagacctttctctgtataacttccttttgtaggacctcgagggcctccaccagcaggtaatatttcagccatgatccagtcaggggagagggcacaggcataagagggaagagccatggtgaaaccgcatctctactaaaaatacaaaaattagctggacgtggtggtgtgcatctgtaatcccggctacttgggaggttgaggcaagagaatcacttgaacccaggaggcagaggttgcagtgagccaagatgggccactgcactccagtctgggcgatagagctagagttgtctcaaaaaaaaaaaagaagagcatgagcgtagtgttccagggcacagtggtctctgttcatggcctgtttgctgctatgagggttaagacttaggggaaaagtttgccagtttctacgaatctccagagattgtttcctagaaccaggccttaactttggtggcatctttttgtgaaatgtggggacagagccacatcttgaatgtgagatagtagggtgatgcccactttgtgccacattttgttagctactgcctgtaggcattttcagtgactaaaagaggctgctagtggtggagatgaagtgtcacccaatttactaaaaaaatcaaactcttcatattacccagaagggtaactgctgttcccccacctccacatatctgcatcaagctgaagttctgtgtcctcatgagctgattttacctttacacagatattggggaacgtgatgatgatatgccctagacctcagcatcctctgtttgatgctacagagggaactgaggactaggggagagggtgtgtcctcagggtaccctgtgctgatcatgcctcgtctctcttctccaggactcctgcactgactcctgaggacttttgtctgggattggtcatcactcttctgtaatgcccacctgcccctgcccagaattcctagctgcctgtgtcaccctgtcccactgaggtcagagtcctacagtggctcatgcagccacaggtcaccttctgtgatccccatcccaaggcactggtggtgactctgcttcctgcactgacccagagcctctgcctgtgcactgcaagctgtgtctactcaggccccaaggggactctctgtttccattctccccccacagacctgtcaagagaagcatgacaaacaaaatcatttaccgactttagtgcttttttccataattaaaccgat

SEQ ID NO: 13 - DNA, 681 bp, Homo Sapiens
atggaggcgcccgccagcgcgcagaccccgcacccgcacgagcccatcagcttcggcatcgaccagatccttaacagcccggaccaggacagcgcacccgccccgcggggccccgacggcgccagctacctgggagggccccccgggggccgtccgggcgccacatacccgtctctgcccgcctcctttgcgggccccggcgcgcccttcgaggacgcgggatcttacagtgtcaacctgagcctagcgcccgcaggcgtgatccgggtgccggcgcacaggccgctgcccggggccgtgccgccgcctctgcctagcgcgctgcccgctatgccctcggtgcccacggtctccagcctagggcgtctcaatttcccctggatggagagcagtcgccgctttgtgaaagaccgcttcacaggtagccagagctggctccaggcctccacggcccttctcggggccagaggcggcgccctgtgcgcccactcccggaaaccatttcagaggcccaagcgcggtcggaggcctcggccccagggccccgggcagccgtggtggggagggtaatcggagagttgcaggaaaataagcgtgcccggggaagggcagggggcgaggggtctcccgaccggcttggtgtcgctggaaacgcgcgcgaccagcgaaatagcggcgctc

SEQ ID NO: 14 - DNA, 137 bp, Homo Sapiens
ccattgatgcctcttctctagattccgccattcgttaggagttgcaaagctgtggtattctcattctagcattgctcctttccttcttgggaatgcttctgtagagagaaactacctctctccgggatgcttttttt

SEQ ID NO: 15 - DNA, 1448 bp, Homo Sapiens
  misc_feature (1393)..(1393): n is a, c, g, or t
ctcctccctctccgccccatagtccacccaacacttgcagcccctccagagaaaaagcccagcggaagaggactccggaaaagtgactatctcggaagaccagggtagagctcccgggagaaaaaggcgaagatccccggccccggatcgccatccccttccctggcaccagcttctctaggctgcgcgaaggaagagggtacgacgccggggagggactgggtgcgcgggcatgaagttggaggtgttcgtccctcgcgcggcccacggggacaagcagggcagtgacctggagggcgcgggcggcagcgacgcgccgtccccgctgtcggcggcgggagacgactccctgggctcagatggggactgcgcggccaagccgtccgcgggcggcggcgccagagatacgcagggcgacggcgaacagagtgcgggaggcgggccgggcgcggaggaggcgatcccggcagcagctgctgcagcggtggtggcggagggcgcggaggccggggcggcggggccaggcgcgggcggcgcggggagcggcgagggtgcacgcagcaagccatatacgcggcggcccaagcccccctactcgtacatcgcgctcatcgccatggccatccgcgactcggcgggcgggcgcttgacgctggcggagatcaacgagtacctcatgggcaagttcccctttttccgcggcagctacacgggctggcgcaactccgtgcgccacaacctttcgctcaacgactgcttcgtcaaggtgctgcgcgacccctcgcggccctggggcaaggacaactactggatgctcaaccccaacagcgagtacaccttcgccgacggggtcttccgccgccgccgcaagcgcctcagccaccgcgcgccggtccccgcgcccgggctgcggcccgaggaggccccgggcctccccgccgccccgccgcccgcgcccgccgccccggcctcgccccgcatgcgctcgcccgcccgccaggaggagcgcgccagccccgcgggcaagttctccagctccttcgccatcgacagcatcctgcgcaagcccttccgcagccgtcgcctcagggacacggcccccgggacgacgcttcagtggggcgccgcgccctgcccgccgctgcccgcgttccccgcgctcctccccgcggcgccctgcagggccctgctgccgctctgcgcgtacggcgcgggcgagccggcgcggctgggcgcgcgcgaggccgaggtgccaccgaccgcgccgcccctcctgcttgcacctctcccggcggcggcccccgccaagccactccgaggcccggcggccggcggcgcgcacctgtactgccccctgcggctgcccgcagccctgcaggcggccttagtccgncgtcctggcccgcacctgtcgtacccggtggagacgctcctagcttgagtaagcc

SEQ ID NO: 16 - DNA, 983 bp, Homo Sapiens
gcggacctgcagcctgtttcaaaataatgatctataccagttgacttagagtgatttccacgatgctctggtgaaaaagaaaagttagttttagagaagacgctcatgaattcgcggccgcgtcgacgggatatagacaggcttgagcacctccacctcacagaatttggactaaaattggggcaaaaaatatttttgttaaacaaaagagattttattttatttttatcattattttgaaacaggttcttgctctgtcacccagggtggagtgcagtagcacaaggtgcatcccgggatcaagccttcctcctgtctcagcctccccagtagctgagactgatacaggaggtagaaagaaattatttaggcagatagtgagggcaaatgagtcctcagcagagcttcctttctaacaaaaagcagcccaagaaattagttttctcctaacaaaaagtagcctgaaaaatctagctgcaaacataggtaagcaagctggaacattgcacaggggaatgctggcagctgtgtcaatagaaaagggtactgggggccaggcatgtccatcatggaagcttcatcttcctttttgttagcacgtgtacagtaagaaagaagtgggcaacatggcacagcttaggctgaaaacccgcctgcataataaaatactggggtgggggctgccagaaaatcgtgccccatgcaaatggcacacctggtcctaaccagctttttgtgccctacgtagatcagacacaactttccaaccagctcatctataaaaccttctgcatttcaccgtgggtcgacaacccatttttctgggacccctctctgtagcagagagctattttctttcttttgcctattaaacttcctgctgttaacctcactcttgtggtgtccatgtccttgatctctgtggctgtgagacaatgaacctcaggttttaccccagacaatgaggctgcttcaagactaca

SEQ ID NO: 17 - DNA, 232 bp, Homo Sapiens
gtcaccttccaactatccggtgcttaggaaatggaagatgggctatacctaaaattacctgcatgaaccgtaagtggtcctttagaaagaatggactaccgtgctataacaactactagacaccttcattttacggctgtggtatcggcagtttagggtatggagcaagtaatattgtgtgttttctttttttctttctttccttccatgtagcatctgcataccaaaggac

SEQ ID NO: 18 - DNA, 5616 bp, Homo Sapiens
gcttcagtcccgcgaccgaagcagggcgcgcagcagcgctgagtgccccggaacgtgcgtcgcgcccccagtgtccgtcgcgtccgccgcgccccgggcggggatggggcggccagactgagcgccgcacccgccatccagacccgccggccctagccgcagtccctccagccgtggccccagcgcgcacgggcgatggcgaaggcgacgtccggtgccgcggggctgcgtctgctgttgctgctgctgctgccgctgctaggcaaagtggcattgggcctctacttctcgagggatgcttactgggagaagctgtatgtggaccaggcagccggcacgcccttgctgtacgtccatgccctgcgggacgcccctgaggaggtgcccagcttccgcctgggccagcatctctacggcacgtaccgcacacggctgcatgagaacaactggatctgcatccaggaggacaccggcctcctctaccttaaccggagcctggaccatagctcctgggagaagctcagtgtccgcaaccgcggctttcccctgctcaccgtctacctcaaggtcttcctgtcacccacatcccttcgtgagggcgagtgccagtggccaggctgtgcccgcgtatacttctccttcttcaacacctcctttccagcctgcagctccctcaagccccgggagctctgcttcccagagacaaggccctccttccgcattcgggagaaccgacccccaggcaccttccaccagttccgcctgctgcctgtgcagttcttgtgccccaacatcagcgtggcctacaggctcctggagggtgagggtctgcccttccgctgcgccccggacagcctggaggtgagcacgcgctgggccctggaccgcgagcagcgggagaagtacgagctggtggccgtgtgcaccgtgcacgccggcgcgcgcgaggaggtggtgatggtgcccttcccggtgaccgtgtacgacgaggacgactcggcgcccaccttccccgcgggcgtcgacaccgccagcgccgtggtggagttcaagcggaaggaggacaccgtggtggccacgctgcgtgtcttcgatgcagacgtggtacctgcatcaggggagctggtgaggcggtacacaagcacgctgctccccggggacacctgggcccagcagaccttccgggtggaacactggcccaacgagacctcggtccaggccaacggcagcttcgtgcgggcgaccgtacatgactataggctggttctcaaccggaacctctccatctcggagaaccgcaccatgcagctggcggtgctggtcaatgactcagacttccagggcccaggagcgggcgtcctcttgctccacttcaacgtgtcggtgctgccggtcagcctgcacctgcccagtacctactccctctccgtgagcaggagggctcgccgatttgcccagatcgggaaagtctgtgtggaaaactgccaggcattcagtggcatcaacgtccagtacaagctgcattcctctggtgccaactgcagcacgctaggggtggtcacctcagccgaggacacctcggggatcctgtttgtgaatgacaccaaggccctgcggcggcccaagtgtgccgaacttcactacatggtggtggccaccgaccagcagacctctaggcaggcccaggcccagctgcttgtaacagtggaggggtcatatgtggccgaggaggcgggctgccccctgtcctgtgcagtcagcaagagacggctggagtgtgaggagtgtggcggcctgggctccccaacaggcaggtgtgagtggaggcaaggagatggcaaagggatcaccaggaacttctccacctgctctcccagcaccaagacctgccccgacggccactgcgatgttgtggagacccaagacatcaacatttgccctcaggactgcctccggggcagcattgttgggggacacgagcctggggagccccgggggattaaagctggctatggcacctgcaactgcttccctgaggaggagaagtgcttctgcgagcccgaagacatccaggatccactgtgcgacgagctgtgccgcacggtgatcgcagccgctgtcctcttctccttcatcgtctcggtgctgctgtctgccttctgcatccactgctaccacaagtttgcccacaagccacccatctcctcagctgagatgaccttccggaggcccgcccaggccttcccggtcagctactcctcttccggtgcccgccggccctcgctggactccatggagaaccaggtctccgtggatgccttcaagatcctggaggatccaaagtgggaattccctcggaagaacttggttcttggaaaaactctaggagaaggcgaatttggaaaagtggtcaaggcaacggccttccatctgaaaggcagagcagggtacaccacggtggccgtgaagatgctgaaagagaacgcctccccgagtgagctgcgagacctgctgtcagagttcaacgtcctgaagcaggtcaaccacccacatgtcatcaaattgtatggggcctgcagccaggatggcccgctcctcctcatcgtggagtacgccaaatacggctccctgcggggcttcctccgcgagagccgcaaagtggggcctggctacctgggcagtggaggcagccgcaactccagctccctggaccacccggatgagcgggccctcaccatgggcgacctcatctcatttgcctggcagatctcacaggggatgcagtatctggccgagatgaagctcgttcatcgggacttggcagccagaaacatcctggtagctgaggggcggaagatgaagatttcggatttcggcttgtcccgagatgtttatgaagaggattcctacgtgaagaggagccagggtcggattccagttaaatggatggcaattgaatccctttttgatcatatctacaccacgcaaagtgatgtatggtcttttggtgtcctgctgtgggagatcgtgaccctagggggaaacccctatcctgggattcctcctgagcggctcttcaaccttctgaagaccggccaccggatggagaggccagacaactgcagcgaggagatgtaccgcctgatgctgcaatgctggaagcaggagccggacaaaaggccggtgtttgcggacatcagcaaagacctggagaagatgatggttaagaggagagactacttggaccttgcggcgtccactccatctgactccctgatttatgacgacggcctctcagaggaggagacaccgctggtggactgtaataatgcccccctccctcgagccctcccttccacatggattgaaaacaaactctatggcatgtcagacccgaactggcctggagagagtcctgtaccactcacgagagctgatggcactaacactgggtttccaagatatccaaatgatagtgtatatgctaactggatgctttcaccctcagcggcaaaattaatggacacgtttgatagttaacatttctttgtgaaaggtaatggactcacaaggggaagaaacatgctgagaatggaaagtctaccggccctttctttgtgaacgtcacattggccgagccgtgttcagttcccaggtggcagactcgtttttggtagtttgttttaacttccaaggtggttttacttctgatagccggtgattttccctcctagcagacatgccacaccgggtaagagctctgagtcttagtggttaagcattcctttctcttcagtgcccagcagcacccagtgttggtctgtgtccatcagtgaccaccaacattctgtgttcacatgtgtgggtccaacacttactacctggtgtatgaaattggacctgaactgttggatttttctagttgccgccaaacaaggcaaaaaaatttaaacatgaagcacacacacaaaaaaggcagtaggaaaaatgctggccctgatgacctgtccttattcagaatgagagactgcggggggggcctgggggtagtgtcaatgcccctccagggctggaggggaagaggggccccgaggatgggcctgggctcagcattcgagatcttgagaatgattttttttaaatcatgcaacctttccttaggaagacatttggttttcatcatgattaagatgattcctagatttagcacaatggagagattccatgccatctttactatgtggatggtggtatcagggaagagggctcacaagacacatttgtcccccgggcccaccacatcatcctcacgtgttcggtactgagcagccactacccctgatgagaacagtatgaagaaagggggctgttggagtcccagaattgctgacagcagaggctttgctgctgtgaatcccacctgccaccagcctgcagcacaccccacagccaagtagaggcgaaagcagtggctcatcctacctgttaggagcaggtagggcttgtactcactttaatttgaatcttatcaacttactcataaagggacaggctagctagctgtgttagaagtagcaatgacaatgaccaaggactgctacacctctgattacaattctgatgtgaaaaagatggtgtttggctcttatagagcctgtgtgaaaggcccatggatcagctcttcctgtgtttgtaatttaatgctgctacaagatgtttctgtttcttagattctgaccatgactcataagcttcttgtcattcttcattgcttgtttgtggtcacagatgcacaacactcctccagtcttgtgggggcagcttttgggaagtctcagcagctcttctggctgtgttgtcagcactgtaacttcgcagaaaagagtcggattaccaaaacactgcctgctcttcagacttaaagcactgataggacttaaaatagtctcattcaaatactgtattttatataggcatttcacaaaaacagcaaaattgtggcattttgtgaggccaaggcttggatgcgtgtgtaatagagccttgtggtgtgtgcgcacacacccagagggagagtttgaaaaatgcttattggacacgtaacctggctctaatttgggctgtttttcagatacactgtgataagttcttttacaaatatctatagacatggtaaacttttggttttcagatatgcttaatgatagtcttactaaatgcagaaataagaataaactttctcaaattattaaaaatgcctacacagtaagtgtgaattgctgcaacaggtttgttctcaggagggtaagaactccaggtctaaacagctgacccagtgatggggaatttatccttgaccaatttatccttgaccaataacctaattgtctattcctgagttataaaagtccccatccttattagctctactggaattttcatacacgtaaatgcagaagttactaagtattaagtattactgagtattaagtagtaatctgtcagttattaaaatttgtaaaatctatttatgaaaggtcattaaaccagatcatgttcctttttttgtaatcaaggtgactaagaaaatcagttgtgtaaataaaatcatgtatc

SEQ ID NO: 19 - DNA, 357 bp, Homo Sapiens
ggctccatccagctgtgcagtggggaggactggccagaccttctgtccactgttgcaatgaccccaggaagctacccccaataaactgtgcctgctcagagccccagggctggctggcggctccgcgcagtcccagagggccccggatagggtgctctgccactccggacagcagcagggactgccgagagcagcaggaggctctgtcccccacccccgctgccactgtggagccgggagggctgactggccaggtcccccagagctggacgtgtgcgtggaggaggccgagggcgaggcgccgtggacgtggaccggcctctgcatcttcgccgcactcttcctgctcagcgtgag

SEQ ID NO: 20 - DNA, 2157 bp, Homo Sapiens
tggggtgttctgctctggcggcagcggcagcggcggcgggacgcggaggctcccccgggattcggcctcagcagcgaggcggcggcggcggctgcggaggcgcaggcagcaactgaggcagcggcaggctcaggtgcagccgctgctcaaagaaaatgaacggcaccctggaccacccagaccaaccagatcttgatgctatcaagatgtttgtgggccaggttccaaggacctggtctgaaaaggacttgcgggaactcttcgaacagtatggtgctgtgtatgaaatcaacgtcctaagggataggagccaaaacccgcctcagagcaaagggtgctgttttgttacattttacacccgtaaagctgcattagaagctcagaatgctcttcacaacatgaaagtcctcccagggatgcatcaccctatacagatgaaacctgctgacagtgagaagaacaatgcagtggaagacaggaagctgtttattggtatgatttccaagaagtgcactgaaaatgacatccgagtcatgttctcttcgtttggacagattgaagaatgccggatattgcggggacctgatggcctgagccgaggttgtgcatttgtgacttttacaacaagagccatggcacagacggctatcaaggcaatgcaccaagcacagaccatggagggttgctcatcacccatggtggtaaaatttgctgatacacagaaggacaaagaacagaagagaatggcccagcagctccagcagcagatgcagcaaatcagcgcagcatctgtgtggggaaaccttgctggtctaaatactcttggaccccagtatttagcactccttcagcagactgcctcctctgggaacctcaacaccctgagcagcctccacccaatgggagggttgaatgcaatgcagttacagaatttggctgcactagctgctgcagctagtgcagctcagaacacaccaagtggtaccaatgctctcactacatccagcagtcccctcagcgtgctcactagttcagggtcctcacctagctctagcagcagtaattctgtcaaccccatagcctcacttggagccctgcagacattagctggagcaacggctggcctcaatgttggctctttggcaggaatggctgctttaaatggtggcctgggcagcagtggcctttccaatggcaccgggagcaccatggaggccctcactcaggcctactcgggtatccagcaatatgctgctgctgcgctccccactctgtacaaccagaatcttctgacacagcagagtattggtgctgctggaagccagaaggaaggtccagagggagccaacctgttcatctaccacctgccccaggagtttggtgatcaggacctgctgcagatgtttatgccctttgggaatgtcgtgtctgccaaggttttcatagacaagcagacaaacctgagcaagtgttttggttttgtaagttacgacaatcctgtttcggcccaagctgccatccagtccatgaacggctttcagattggcatgaagcggcttaaagtgcagctcaaacgttcgaagaatgacagcaagccctactgagcgtgctcccctctgagactggagtgagagggtcttctgattcctgccgtttgttcatcgttgtgcctaaagcatgtcgatgtggcgtcaagtacatcgtccaaatccctgtctcttcagcttctctgatgcttgaactctcacctttgaccttgtgttgacctttgatgctgatgtgtatttttattatgtttgtttctttcttcgtttttttttctttttttctttcctttttttttccttttgtgctgccaaattggttttgctagaacgactgctgaaggggaaatatttaaacttgcatttgaatataaaaaaaatctatttttctagaacttcataagataaccacttgattttgtgattccaattctttgtaattgtcttcagagcagccctactagcacataccgcgtggtgtttgtatttctgtgaacacacagccagtccgtttctaggctttgtttctctgtgtgcttagttttaaagacaactttgaagtaaacaatgaaataaaagatgtcactaaaacctctgaaaaaaaaaaaaaaaa

SEQ ID NO: 21 - DNA, 2485 bp, Homo Sapiens
tgagtagcattcattgaatctgcggatttcatgacgtctctctgcgtggtccaccacttttctcctaaccggggattttttttttcttctgccactcttatctttccccacttcattccacccagtctccctcccccgtccctgcccaaacgcgcgcccctccgcccctcccttggccccagcgcccagccctgctctccgcgctcggccagagggagccagtccggagacggccgcacctggctggagaggctgggcgggcggaggggtggagacccgcggacgccgggaagccggacctggagccggagcagccgcgagcagaatggagtctcctaacagcctctcggtgctgatgtgaaatttgaccatctgattccagtttttttcttttccttttcttttttgcatttccttccctcgccatccgtcgtgtagtgaattgttcagtcttgctccgtttcaagagaggagatcatgattgagtgaagccaccccgtccgcagccaggaaaagcacaaagaagaaactgcaacaatggccaagctgacagaatccatgactaacgtcctggagggcgactccatggatcaggacgtcgaaagcccagtggccattcaccagccaaagttgcctaagcaggccagggatgacctgccaagacacatcagccgagatcggaccaaaaggaaaatccagaggtacgtgaggaaagacggaaagtgcaatgttcatcacggcaacgtgagggagacctatcgctacctgaccgatatcttcaccacattagtggacctgaagtggagattcaacctattgatttttgtcatggtttacacagtgacctggctcttttttggaatgatctggtggttgatcgcatacatacggggagacatggaccacatagaggacccctcctggactccttgtgttaccaacctcaacgggttcgtctctgcttttttattctcaatagagacagaaaccaccattggttatggctaccgggtcatcacagataaatgcccagagggaattattcttctcttaatccaatctgtgttggggtccattgtcaatgcattcatggtgggatgcatgtttgtaaaaatctctcaacccaagaagagggcagagaccctggtcttttccacccatgcagtgatctccatgcgggatgggaaactgtgcctgatgttccgggtaggggaccttaggaattcccacattgtggaggcttccatcagagccaagttgatcaaatccaaacagacctcggagggggagttcatcccgttgaaccagacggatatcaacgtagggtattacacgggggatgaccgtctgtttctggtgtcaccgctgatcattagccatgaaattaaccaacagagtcctttctgggagatctccaaagcccagctgcccaaagaggaactggaaattgtggtcatcctagaaggaatggtggaagccacagggatgacatgccaagctcgaagctcctacatcaccagtgagatcctgtggggttaccggttcacacctgtcctgaccctggaggacgggttctacgaagttgactacaacagcttccatgagacctatgagaccagcaccccatcccttagtgccaaagagctggccgagttagccagcagggcagagctgcccctgagttggtctgtatccagcaaactcaaccaacatgcagaactggagactgaagaggaagaaaagaacctcgaagagcaaacagaaagaaatggtgatgtggcaaacctggagaatgaatccaaagtttagtgccctagctgggcaaacccttctcttctccccccaacacaatctttccttgtctctcattctctttctttttctgtctctcttgctttgttctttatttgtttatatttaatttttacatgaccagaaaacaaatcttcaaggtgtaaaatatctacctgccctctctcagttattcagattgacaaggtagacatggatttgatgaaagtgcaaagtgccctcatttgtggcccaagcctggtctcctcccaaaatactacacatccaactcctggagatttcagttacttacctgcatgtgttgtacaataccagatcactcaaaaaggtgtgtcaaagattttacctgggatatgacaagcaaggtttctggtgcctatttattcattcagtgagacacagagtggagccctcagttttatggatcccaattcatttcatctactacagggtgaggtgcttgcccccatgtgggtgtggcagttacagggcccaggtgagctgaagacaaaccactgtacatatatatgccttatgtaattattttctttttgtaattagtaataaaacccagcatgtacaaaagtaccatagaacagaactgctaaatactgtacatagatgtatcattaatgtaggtttagatatataactttagaaataagaagcaaaa

SEQ ID NO: 22 - DNA, 6906 bp, Homo Sapiens
ggcgcgggcggcctggagccccgggagcggcgcgcgcggtcccggcccagccggctctcctggcctcgcgctgcacattctctcctggcggcggcgccacctgcagtagcgttcgcccgaacatggcgacacggagcagcaggagggagtcgcgactcccgttcctattcaccctggtcgcactgctgccgcccggagctctctgcgaagtctggacgcagaggctgcacggcggcagcgcgcccttgccccaggaccggggcttcctcgtggtgcagggcgacccgcgcgagctgcggctgtgggcgcgcggggatgccaggggggcgagccgcgcggacgagaagccgctccggaggaaacggagcgctgccctgcagcccgagcccatcaaggtgtacggacaggttagtctgaatgattcccacaatcagatggtggtgcactgggctggagagaaaagcaacgtgatcgtggccttggcccgagatagcctggcattggcgaggcccaagagcagtgatgtgtacgtgtcttacgactatggaaaatcattcaagaaaatttcagacaagttaaactttggcttgggaaataggagtgaagctgttatcgcccagttctaccacagccctgcggacaacaagcggtacatctttgcagacgcttatgcccagtacctctggatcacgtttgacttctgcaacactcttcaaggcttttccatcccatttcgggcagctgatctcctcctacacagtaaggcctccaaccttctcttgggctttgacaggtcccaccccaacaagcagctgtggaagtcagatgactttggccagacctggatcatgattcaggaacatgtcaagtccttttcttggggaattgatccctatgacaaaccaaataccatctacattgaacgacacgaaccctctggctactccactgtcttccgaagtacagatttcttccagtcccgggaaaaccaggaagtgatccttgaggaagtgagagattttcagcttcgggacaagtacatgtttgctacaaaggtggtgcatctcttgggcagtgaacagcagtcttctgtccagctctgggtctcctttggccggaagcccatgagagcagcccagtttgtcacaagacatcctattaatgaatattacatcgcagatgcctccgaggaccaggtgtttgtgtgtgtcagccacagtaacaaccgcaccaatttatacatctcagaggcagaggggctgaagttctccctgtccttggagaacgtgctctattacagcccaggaggggccggcagtgacaccttggtgaggtattttgcaaatgaaccatttgctgacttccaccgagtggaaggattgcaaggagtctacattgctactctgattaatggttctatgaatgaggagaacatgagatcggtcatcacctttgacaaagggggaacctgggagtttcttcaggctccagccttcacgggatatggagagaaaatcaattgtgagctttcccagggctgttcccttcatctggctcagcgcctcagtcagctcctcaacctccagctccggagaatgcccatcctgtccaaggagtcggctccaggcctcatcatcgccactggctcagtgggaaagaacttggctagcaagacaaacgtgtacatctctagcagtgctggagccaggtggcgagaggcacttcctggacctcactactacacatggggagaccacggcggaatcatcacggccattgcccagggcatggaaaccaacgagctaaaatacagtaccaatgaaggggagacctggaaaacattcatcttctctgagaagccagtgtttgtgtatggcctcctcacagaacctggggagaagagcactgtcttcaccatctttggctcgaacaaagagaatgtccacagctggctgatcctccaggtcaatgccacggatgccttgggagttccctgcacagagaatgactacaagctgtggtcaccatctgatgagcgggggaatgagtgtttgctgggacacaagactgttttcaaacggcggaccccccatgccacatgcttcaatggagaggactttgacaggccggtggtcgtgtccaactgctcctgcacccgggaggactatgagtgtgacttcggtttcaagatgagtgaagatttgtcattagaggtttgtgttccagatccggaattttctggaaagtcatactcccctcctgtgccttgccctgtgggttctacttacaggagaacgagaggctaccggaagatttctggggacacttgtagcggaggagatgttgaagcgcgactggaaggagagctggtcccctgtcccctggcagaagagaacgagttcattctgtatgctgtgaggaaatccatctaccgctatgacctggcctcgggagccaccgagcagttgcctctcaccgggctacgggcagcagtggccctggactttgactatgagcacaactgtttgtattggtccgacctggccttggacgtcatccagcgcctctgtttgaatggaagcacagggcaagaggtgatcatcaattctggcctggagacagtagaagctttggcttttgaacccctcagccagctgctttactgggtagatgcaggcttcaaaaagattgaggtagctaatccagatggcgacttccgactcacaatcgtcaattcctctgtgcttgatcgtcccagggctctggtcctcgtgccccaagagggggtgatgttctggacagactggggagacctgaagcctgggatttatcggagcaatatggatggttctgctgcctatcacctggtgtctgaggatgtgaagtggcccaatggcatctctgtggacgaccagtggatttactggacggatgcctacctggagtgcatagagcggatcacgttcagtggccagcagcgctctgtcattctggacaacctcccgcacccctatgccattgctgtctttaagaatgaaatctactgggatgactggtcacagctcagcatattccgagcttccaaatacagtgggtcccagatggagattctggcaaaccagctcacggggctcatggacatgaagattttctacaaggggaagaacactggaagcaatgcctgtgtgcccaggccatgcagcctgctgtgcctgcccaaggccaacaacagtagaagctgcaggtgtccagaggatgtgtccagcagtgtgcttccatcaggggacctgatgtgtgactgccctcagggctatcagctcaagaacaatacctgtgtcaaagaagagaacacctgtcttcgcaaccagtatcgctgcagcaacgggaactgtatcaacagcatttggtggtgtgactttgacaacgactgtggagacatgagcgatgagagaaactgccctaccaccatctgtgacctggacacccagtttcgttgccaggagtctgggacttgtatcccactgtcctataaatgtgaccttgaggatgactgtggagacaacagtgatgaaagtcattgtgaaatgcaccagtgccggagtgacgagtacaactgcagttccggcatgtgcatccgctcctcctgggtatgtgacggggacaacgactgcagggactggtctgatgaagccaactgtaccgccatctatcacacctgtgaggcctccaacttccagtgccgaaacgggcactgcatcccccagcggtgggcgtgtgacggggatacggactgccaggatggttccgatgaggatccagtcaactgtgagaagaagtgcaatggattccgctgcccaaacggcacttgcatcccatccagcaaacattgtgatggtctgcgtgattgctctgatggctccgatgaacagcactgcgagcccctctgtacgcacttcatggactttgtgtgtaagaaccgccagcagtgcctgttccactccatggtctgtgacggaatcatccagtgccgcgacgggtccgatgaggatgcggcgtttgcaggatgctcccaagatcctgagttccacaaggtatgtgatgagttcggtttccagtgtcagaatggagtgtgcatcagtttgatttggaagtgcgacgggatggatgattgcggcgattattctgatgaagccaactgcgaaaaccccacagaagccccaaactgctcccgctacttccagtttcggtgtgagaatggccactgcatccccaacagatggaaatgtgacagggagaacgactgtggggactggtctgatgagaaggattgtggagattcacatattcttcccttctcgactcctgggccctccacgtgtctgcccaattactaccgctgcagcagtgggacctgcgtgatggacacctgggtgtgcgacgggtaccgagattgtgcagatggctctgacgaggaagcctgccccttgcttgcaaacgtcactgctgcctccactcccacccaacttgggcgatgtgaccgatttgagttcgaatgccaccaaccgaagacgtgtattcccaactggaagcgctgtgacggccaccaagattgccaggatggccgggacgaggccaattgccccacacacagcaccttgacttgcatgagcagggagttccagtgcgaggacggggaggcctgcattgtgctctcggagcgctgcgacggcttcctggactgctcggacgagagcgatgaaaaggcctgcagtgatgagttgactgtgtacaaagtacagaatcttcagtggacagctgacttctctggggatgtgactttgacctggatgaggcccaaaaaaatgccctctgcttcttgtgtatataatgtctactacagggtggttggagagagcatatggaagactctggagacccacagcaataagacaaacactgtattaaaagtcttgaaaccagataccacgtatcaggttaaagtacaggttcagtgtctcagcaaggcacacaacaccaatgactttgtgaccctgaggaccccagagggattgccagatgcccctcgaaatctccagctgtcactccccagggaagcagaaggtgtgattgtaggccactgggctcctcccatccacacccatggcctcatccgtgagtacattgtagaatacagcaggagtggttccaagatgtgggcctcccagagggctgctagtaactttacagaaatcaagaacttattggtcaacactctatacaccgtcagagtggctgcggtgactagtcgtggaataggaaactggagcgattctaaatccattaccaccataaaaggaaaagtgatcccaccaccagatatccacattgacagctatggtgaaaattatctaagcttcaccctgaccatggagagtgatatcaaggtgaatggctatgtggtgaaccttttctgggcatttgacacccacaagcaagagaggagaactttgaacttccgaggaagcatattgtcacacaaagttggcaatctgacagctcatacatcctatgagatttctgcctgggccaagactgacttgggggatagccctctggcatttgagcatgttatgaccagaggggttcgcccacctgcacctagcctcaaggccaaagccatcaaccagactgcagtggaatgtacctggaccggcccccggaatgtggtttatggtattttctatgccacgtcctttcttgacctctatcgcaacccgaagagcttgactacttcactccacaacaagacggtcattgtcagtaaggatgagcagtatttgtttctggtccgtgtagtggtaccctaccaggggccatcctctgactacgttgtagtgaagatgatcccggacagcaggcttccaccccgtcacctgcatgtggttcatacgggcaaaacctccgtggtcatcaagtgggaatcaccgtatgactctcctgaccaggacttgttgtatgcaattgcagtcaaagatctcataagaaagactgacaggagctacaaagtaaaatcccgtaacagcactgtggaatacacccttaacaagttggagcctggcgggaaataccacatcattgtccaactggggaacatgagcaaagattccagcataaaaattaccacagtttcattatcagcacctgatgccttaaaaatcataacagaaaatgatcatgttcttctgttttggaaaagcctggctttaaaggaaaagcattttaatgaaagcaggggctatgagatacacatgtttgatagtgccatgaatatcacagcttaccttgggaatactactgacaatttctttaaaatttccaacctgaagatgggtcataattacacgttcaccgtccaagcaagatgcctttttggcaaccagatctgtggggagcctgccatcctgctgtacgatgagctggggtctggtgcagatgcatctgcaacgcaggctgccagatctacggatgttgctgctgtggtggtgcccatcttattcctgatactgctgagcctgggggtggggtttgccatcctgtacacgaagcaccggaggctgcagagcagcttcaccgccttcgccaacagccactacagctccaggctggggtccgcaatcttctcctctggggatgacctgggggaagatgatgaagatgcccctatgataactggattttcagatgacgtccccatggtgatagcctgaaagagctttcctcactagaaaccaaatggtgtaaatattttatttgataaagatagttgatggtttattttaaaagatgcactttgagttgcaatatgttatttttatatgggccaaaaacaaaaaacaaaaaaaaaaa

SEQ ID NO: 23 - DNA, 1937 bp, Homo Sapiens
agaggatcctgggcgccgccaggttctgtggacaatcacaatgggaatccaaggagggtctgtcctgttcgggctgctgctcgtcctggctgtcttctgccattcaggtcatagcctgcagtgctacaactgtcctaacccaactgctgactgcaaaacagccgtcaattgttcatctgattttgatgcgtgtctcattaccaaagctgggttacaagtgtataacaagtgttggaagtttgagcattgcaatttcaacgacgtcacaacccgcttgagggaaaatgagctaacgtactactgctgcaagaaggacctgtgtaactttaacgaacagcttgaaaatggtgggacatccttatcagagaaaacagttcttctgctggtgactccatttctggcagcagcctggagccttcatccctaagtcaacaccaggagagcttctcccaaactccccgttcctgcgtagtccgctttctcttgctgccacattctaaaggcttgatattttccaaatggatcctgttgggaaagaataaaattagcttgagcaacctggctaagatagaggggctctgggagactttgaagaccagtcctgtttgcagggaagccccacttgaaggaagaagtctaagagtgaagtaggtgtgacttgaactagattgcatgcttcctcctttgctcttgggaagaccagctttgcagtgacagcttgagtgggttctctgcagccctcagattatttttcctctggctccttggatgtagtcagttagcatcattagtacatctttggagggtggggcaggagtatatgagcatcctctctcacatggaacgctttcataaacttcagggatcccgtgttgccatggaggcatgccaaatgttccatatgtgggtgtcagtcagggacaacaagatccttaatgcagagctagaggacttctggcagggaagtggggaagtgttccagatagcagggcatgaaaacttagagaggtacaagtggctgaaaatcgagtttttcctctgtctttaaattttatatgggctttgttatcttccactggaaaagtgtaatagcatacatcaatggtgtgttaaagctatttccttgccttttttttattggaatggtaggatatcttggctttgccacacacagttacagagtgaacactctactacatgtgactggcagtattaagtgtgcttattttaaatgttactggtagaaaggcagttcaggtatgtgtgtatatagtatgaatgcagtggggacaccctttgtggttacagtttgagacttccaaaggtcatccttaataacaacagatctgcaggggtatgttttaccatctgcatccagcctcctgctaactcctagctgactcagcatagattgtataaaatacctttgtaacggctcttagcacactcacagatgtttgaggctttcagaagctcttctaaaaaatgatacacacctttcacaagggcaaactttttccttttccctgtgtattctagtgaatgaatctcaagattcagtagacctaatgacatttgtattttatgatcttggctgtatttaatggcataggctgacttttgcagatggaggaatttcttgattaatgttgaaaaaaaacccttgattatactctgttggacaaaccgagtgcaatgaatgatgcttttctgaaaatgaaatataacaagtgggtgaatgtggttatggccgaaaaggatatgcagtatgcttaatggtagcaactgaaagaagacatcctgagcagtgccagctttcttctgttgatgccgttccctgaacataggaaaatagaaacttgcttatcaaaacttaaaaaaaaaaaaaaaaaaaaaaaaaaaaaaaaaaaaaaaaaaaaaaaaaaaaaaaaaaaaaa

SEQ ID NO: 24 - DNA, 2084 bp, Homo Sapiens
aaccaggtacaagctaatactcaacaatactgatgccttgttttttttgctctgtccggacagcaacgctgtagccaatttagatatgctataaatttaagaggttgccatggccacggtgcgcccattggccgctgggccccctacgtgcagcgccacgtcaccaaatctgaataaggatgcgcgaattacgcggcgaccagacaaagatgaggatccggaccgcttgaaagtgggggaaagtgccggcgcctccgccaccggggaaagccgctccgcagcgccgaggccagcagccacccgagatacctggggaagcccggaacaggcgccggggcgtgcggcccgtggcatgaggttgtgaacgccacccgccccccaccaccccactccgggcagcccagcgccaggccagagattgcccaaggactggaccggctgagtcttggtccggaccagactcgccctgcagctgctgagacaagaggcgaagggcagcggagggcccggcaggcccgagggccaggggcccaaagggagggcaaggcggccgaagccgccggggcgcggggctatgatggtgcactgcgccggttgcgagcggcccatcctcgaccgctttctgctgaacgtgctggaccgcgcgtggcacatcaaatgtgttcagtgctgcgagtgcaaaaccaacctctcggagaagtgcttctcgcgcgagggcaagctctactgcaaaaatgactttttcaggcgctttggcacgaaatgcgccggctgcgcgcaaggcatctcgcccagcgacctggtgcgcaaggcccggagcaaagtctttcacctcaactgtttcacctgcatggtgtgtaacaagcagctgtccaccggcgaggagctctacgtcatcgacgagaacaagttcgtgtgcaaagacgactacctgagctcatccagcctcaaggagggcagcctcaactcagtgtcatcctgtacggaccgcagtttgtccccggacctccaggacgcactgcaggacgaccccaaagagacggacaactcgacctcgtcggacaaggagacggccaacaacgagaacgaggagcagaactcgggcaccaagcggcgcggcccccgcaccaccatcaaggccaagcagctggagacgctcaaggctgccttcgccgccacgcccaagcccacgcgccacatccgcgagcagctggcgcaggagaccggcctcaacatgcgcgtcatccaggtgtggtttcagaaccgacggtccaaagaacgccggatgaaacagctgagcgccctaggcgcccggaggcacgccttcttccggagtccgcggcgcatgcgtccgctgggcggccgcttggacgagtctgagatgttggggtccaccccgtacacctactacggagactaccaaggcgactactacgcgccgggaagcaactacgacttcttcgcgcacggcccgccttcgcaggcgcagtccccggccgactccagcttcctggcggcctctggccccggctcgacgccgctgggagcgctggaaccgccgctcgccggcccgcacgccgcggacaaccccaggttcaccgacatgatctcgcacccggacacaccgagccccgagccaggcctgccgggcacgctgcaccccatgcccggcgaggtattcagcggcgggcccagcccgcccttcccaatgagcggcaccagcggctacagcggacccctgtcgcatcccaaccccgagctcaacgaagccgccgtgtggtaaggccgccgggccgccccccgcgctcggcccccgggggccccgccccgaagcagcctcctgaaaccaaaacgcccgacgcagacgcggtgggagacgtgggtgtccctcgggggttctctctcgggtccgcactcaactggcagctgctcctcggctgggcgccgagggggggccgacccccatctccaccccgcgggctctccaggagcctcagcccaccgccagtactctcccagcaaccgcgagcaatttcttgggaccaaagtcaatactccggagggtcaagagatttcgagcacgc

SEQ ID NO: 25 - DNA, 1316 bp, Homo Sapiens
agctagacgccccgaggtcggagtgaagcgccgggaccgagccccgtctcccagggagtccggggcgcacggcaccgaggagagcgcgggagccaacctgggcgcatcatgcgcagggcccgggacgctgggccggtctacaccgccgcctgggtcacgtggcccggacgggccggcggctgccccggccggggggcgggggtcgcgccggggttgcgctggacgacggagagcggcgggcccgcagcggcctggagcctcccaacccgcgccgcgctggccctcgagcgtaggagccgccccctgcccccccgcgccggccccgcgcccggccgcccgccccctatatagcgcgccccagcagggcccgcgccaggccgccagcctcggagtgggcgcgggacagtgcgcggcgccccgcagccaggcccccgcccccgccgcatccacctcctccgccgcctgcgacccaacgggcgccccccgccggcagctcgcgccgggcccccgcggccaccatgaagaaggaggtgtgctccgtggccttcctcaaggccgtgttcgcagagttcttggccaccctcatcttcgtcttctttggcctgggctcggccctcaagtggccgtcggcgctgcctaccatcctgcagatcgcgctggcgtttggcctggccataggcacgctggcccaggccctgggacccgtgagcggcggccacatcaaccccgccatcaccctggccctcttggtgggcaaccagatctcgctgctccgggctttcttctacgtggcggcccagctggtgggcgccattgccggggctggcatcctctacggtgtggcaccgctcaatgcccggggcaatctggccgtcaacgcgctcaacaacaacacaacgcagggccaggccatggtggtggagctgattctgaccttccagctggcactctgcatcttcgcctccactgactcccgccgcaccagccctgtgggctccccagccctgtccattggcctgtctgtcaccctgggccaccttgtcggaatctacttcactggctgctccatgaacccagcccgctcttttggccctgcggtggtcatgaatcggttcagccccgctcactgggttttctgggtagggcccatcgtgggggcggtcctggctgccatcctttacttctacctgctcttccccaactccctgagcctgagtgagcgtgtggccatcatcaaaggcacgtatgagcctgacgaggactgggaggagcagcgggaagagcggaagaagaccatggagctgaccacccgctga

SEQ ID NO: 26 - DNA, 331 bp, Homo Sapiens
  misc_feature (130)..(130): n is a, c, g, or t
  misc_feature (167)..(167): n is a, c, g, or t
  misc_feature (234)..(234): n is a, c, g, or t
  misc_feature (246)..(246): n is a, c, g, or t
cagattcacttcacttttattatgaacaaacacaatctcagattagtacaattagcttcagagttgatattaatagaaattattccaaaattattcttgtcacaagtaactactatatcccacataaaangggaaaaaatcccacccaatcacagaaaaggcatccnctgtatgtttccgtggcaatgcgttgtttatgtattctcaaattttgtctggctagttatccaccgnttctccaatggnttcattcagtttcttggagaaccatataggctaatgacagcatctgggacacacggacggtatcaagttcatggtgggacattcc

SEQ ID NO: 27 - DNA, 3124 bp, Homo Sapiens
taagatccacatcagctcaactgcacttgcctcgcagaggcagcccgctcacttcccgcggaggcgctccccggcgccgcgctccgcggcagccgcctgcccccggcgctgcccccgcccgccgcgccgccgccgccgccgcgcacgccgcgccccgcagctctgggcttcctcttcgcccgggtggcgttgggcccgcgcgggcgctcgggtgactgcagctgctcagctcccctcccccgccccgcgccgcgcggccgcccgtcgcttcgcacagggctggatggttgtattgggcagggtggctccaggatgttaggaactgtgaagatggaagggcatgaaaccagcgactggaacagctactacgcagacacgcaggaggcctactcctccgtcccggtcagcaacatgaactcaggcctgggctccatgaactccatgaacacctacatgaccatgaacaccatgactacgagcggcaacatgaccccggcgtccttcaacatgtcctatgccaacccgggcctaggggccggcctgagtcccggcgcagtagccggcatgccggggggctcggcgggcgccatgaacagcatgactgcggccggcgtgacggccatgggtacggcgctgagcccgagcggcatgggcgccatgggtgcgcagcaggcggcctccatgaatggcctgggcccctacgcggccgccatgaacccgtgcatgagccccatggcgtacgcgccgtccaacctgggccgcagccgcgcgggcggcggcggcgacgccaagacgttcaagcgcagctacccgcacgccaagccgccctactcgtacatctcgctcatcaccatggccatccagcaggcgcccagcaagatgctcacgctgagcgagatctaccagtggatcatggacctcttcccctattaccggcagaaccagcagcgctggcagaactccatccgccactcgctgtccttcaatgactgcttcgtcaaggtggcacgctccccggacaagccgggcaagggctcctactggacgctgcacccggactccggcaacatgttcgagaacggctgctacttgcgccgccagaagcgcttcaagtgcgagaagcagccgggggccggcggcgggggcgggagcggaagcgggggcagcggcgccaagggcggccctgagagccgcaaggacccctctggcgcctctaaccccagcgccgactcgcccctccatcggggtgtgcacgggaagaccggccagctagagggcgcgccggcccccgggcccgccgccagcccccagactctggaccacagtggggcgacggcgacagggggcgcctcggagttgaagactccagcctcctcaactgcgccccccataagctccgggcccggggcgctggcctctgtgcccgcctctcacccggcacacggcttggcaccccacgagtcccagctgcacctgaaaggggacccccactactccttcaaccacccgttctccatcaacaacctcatgtcctcctcggagcagcagcataagctggacttcaaggcatacgaacaggcactgcaatactcgccttacggctctacgttgcccgccagcctgcctctaggcagcgcctcggtgaccaccaggagccccatcgagccctcagccctggagccggcgtactaccaaggtgtgtattccagacccgtcctaaacacttcctagctcccgggactggggggtttgtctggcatagccatgctggtagcaagagagaaaaaatcaacagcaaacaaaaccacacaaaccaaaccgtcaacagcataataaaatcccaacaactatttttatttcatttttcatgcacaacctttcccccagtgcaaaagactgttactttattattgtattcaaaattcattgtgtatattactacaaagacaaccccaaaccaatttttttcctgcgaagtttaatgatccacaagtgtatatatgaaattctcctccttccttgcccccctctctttcttccctctttcccctccagacattctagtttgtggagggttatttaaaaaaacaaaaaaggaagatggtcaagtttgtaaaatatttgtttgtgctttttccccctccttacctgaccccctacgagtttacaggtctgtggcaatactcttaaccataagaattgaaatggtgaagaaacaagtatacactagaggctcttaaaagtattgaaagacaatactgctgttatatagcaagacataaacagattataaacatcagagccatttgcttctcagtttacatttctgatacatgcagatagcagatgtctttaaatgaaatacatgtatattgtgtatggacttaattatgcacatgctcagatgtgtagacatcctccgtatatttacataacatatagaggtaatagataggtgatatacatgatacattctcaagagttgcttgaccgaaagttacaaggaccccaacccctttgtcctctctacccacagatggccctgggaatcaattcctcaggaattgccctcaagaactctgcttcttgctttgcagagtgccatggtcatgtcattctgaggtcacataacacataaaattagtttctatgagtgtataccatttaaagaatttttttttcagtaaaagggaatattacaatgttggaggagagataagttatagggagctggatttcaaaacgtggtccaagattcaaaaatcctattgatagtggccattttaatcattgccatcgtgtgcttgtttcatccagtgttatgcactttccacagttggacatggtgttagtatagccagacgggtttcattattatttctctttgctttctcaatgttaatttattgcatggtttattctttttctttacagctgaaattgctttaaatgatggttaaaattacaaattaaattgttaatttttatcaatgtgattgtaattaaaaatattttgatttaaataacaaaaataataccagattttaagccgtggaaaatgttcttgatcatttgcagttaaggactttaaataaatcaaatgttaacaaaaaaaaaaaaaaaa

SEQ ID NO: 28 - DNA, 1404 bp, Homo Sapiens
atggccacccagacctgcacccctaccttctccactgggtctatcaagggcctctgtggcacagcaggcggcatctctcgggtgtcctccatccgttctgtgggctcctgcagggtccccagtctcgccggtgctgcagggtacatctcttctgctaggtcgggcctctctggccttgggagctgcttgcctggctcctacctgtcttctgagtgccacacctctggctttgtggggagcgggggctggttctgcgagggctccttcaacggcagcgagaaggagactatgcagttcctgaacgaccgcctggccaactacctggagaaggtgcgtcagctggagcgggagaacgcggagctggagagccgcatccaggagtggtacgagtttcagatcccatacatctgcccagactaccagtcctacttcaagaccatcgaagatttccagcagaagatcctgctgactaagtctgagaatgccaggctggtcctgcagattgataatgccaagctggctgctgacgacttccggaccaagtatgagacagagctgtctctgcggcagctagtggaggccgacatcaacggcctgcgtaggatcctggatgagctgaccctgtgcaaggctgacctggaggctcaggtggagtccctgaaggaggagctgatgtgcctcaagaagaatcacgaggaggaagtcagtgtactccgttgccaacttggggaccgactgaatgtggaggtggacgctgctcccccagtggatctcaacaagatcctggaggatatgagatgccagtacgaggccctggtggagaataaccgcagagatgtggaggcctggttcaacacccagactgaggagctgaaccagcaggtggtgtccagctcggagcagctgcagtgctgccagacggagatcatcgagctgagacgtacggtcaacgcgctagagattgagctgcaggctcagcacagcatgcggaattccttggaatccaccctggccgaaaccgaggcccgctacagctcccagctggcccagatgcagtgcctgatcagcaacgtggaggcccagctgtctgagatccgctgcgacctggagcggcagaaccaggagtaccaggtgttactggacgtcaaggcccggctggagggcgagatcgctacctaccgccacctgctggagggagaggactgcaagcttcctccccaaccttgtgccacggcatgcaagcctgttattagagttccttctgtccccccggtgccctgtgtcccctctgtgccctgcaccccggctccccaggttggcactcagatccgcaccatcaccgaggagatcagagatgggaaagtcatctcctccagggagcacgtgcagtcccgcccgctgtga

SEQ ID NO: 29 - DNA, 1932 bp, Homo Sapiens
ccggactgcggaaggatggagctggccgccggaagcttctcggaggagcagttctgggaggcctgcgccgagctccagcagcccgctctggccggggccgactggcagctcctagtggagacctcgggcatcagcatctaccggctgctggacaagaagactggacttcatgagtataaagtctttggtgttctggaggactgctcaccaactctactggcagacatctatatggactcagattacagaaaacaatgggaccagtatgttaaagaactctatgaacaagaatgcaacggagagactgtggtctactgggaagtgaagtacccttttcccatgtccaacagagactatgtctaccttcggcagcggcgagacctggacatggaagggaggaagatccatgtgatcctggcccggagcacctccatgcctcagcttggcgagaggtctggggtgatccgggtgaagcaatacaagcagagcctggcgattgagagtgacggcaagaaggggagcaaagttttcatgtattacttcgataacccgggtggccaaattccgtcctggctcattaactgggccgccaagaatggagttcctaacttcttgaaagacatggcaagagcctgtcagaactacctcaagaaaacctaagaaagagaactgggaacattgcatccatgggttgatgtctctggaagtgcaaccacccaatgtctctggaagtgccacctggaagtgccacctggaagtgtctctggaagagcacccaccactgttcagccttcccctgctgtttctgtcttcagaggcctacacactaccacatcctttctaagcatgtttgcctgacatccagctcactcgtctgcttcctttctcgctccccccatcctgggctgggctgccttcttctacagttcaatatggggcagactagggaaacctttgcttgcttactattaggaggggaagtcttcagtagggaacacgatcattccattgtgcaattttacggggatgggtgggcggagggacacaacaaaatttaagaatgactatttgggcgggctggctcttttgcagcttgtgatttcttccagcttgggaggggctgctggaagtggcatttcgttcagagctgactttcagtgcacccaaactggatgacgtgccaatgtccatttgccttatgctttgtggagctgattaggctgggatttgaggtgataatccagtaagtctttcctcgttcctacttgtggaggatcagtagctgttatgatgccagaccatttggagaagtatcagaggcctgaccggacacataatacgacaaccacatttttcctcatcatccatgaggaaatggatgatttctcttttccatatgtcactgggggaaaggctgcctgtacctctcaagctttgcattttactggaaactgaggcgtcaagatggctgtggcagctagcaaaagcaaagatgctttgtgcatagccttgtgaaaaagtatctttctatgcaataagatgaattttcctcccagaatatttagaaatgtagaagggataacagttcacagccaggtaaaatttaactggtggcttaatgactctgcacctttttctcaggaattctgcctaagttgtctgccttttctaccaccaaaaagacttttagttttctatgctttctcctgaattttggtagggtaagtatttctatgtcaaaggcacagccttgatgatctcagggaaaaattttaatcactgtgtataatgatactgaaccttgattaataacagaaattcaggatgtaaagccacagaatgggatttattaatgtgggatacctcagactgtttgttttctttctgggaagaaaagtgtgttctataatgaataaatatagagtggttttt

SEQ ID NO: 30 - DNA, 1979 bp, Homo Sapiens
agtaggaagccgcggggtggtggcgagagaggacccaggtgtcctagcagtgggcgccgcggggcacacgctgggccaaggtgcaggcggccagggtgggagactgttcgccccgccctgagtactcctatcttgtttctccacctgttcgggagttggagatgtgcacctaaaggaggcgcatctggggacggacacatctggcactgaggccctcgccacctgcctcgccacctggcgaccctgaccccaccacactgccttgaggtaggaaaaggaggctcctcaaccacaacttctgacctcccagggtgtctgaggcctctaaagagcttagtttgcccctctgggaagtgaatccttggcttatggtgccggggggaccctggaggccccctcacacgaaggctgcttcttgcagagtcgctcaaaagtagggccccagggctcgcagcagcatgggcaccgagaaagaaagcccagagcccgactgccagaaacagttccaggctgcagtgagcgtcatccagaacctgcccaagaacggttcttaccgcccctcctatgaagagatgctgcgattctacagttactacaagcaggccaccatggggccctgcctggtcccccggcccgggttctgggaccccattggacgatataagtgggacgcctggaacagtctgggcaagatgagcagggaggaggccatgtctgcctacatcactgaaatgaaactggtggcacagaaggtgatcgacacagtgcccctgggtgaggtggcagaggacatgtttggttacttcgagcccctgtaccaggtgatccctgacatgccgaggcccccagagaccttcctgagaagggtcacaggttggaaagagcaggttgtgaatggagatgttggggctgtttcagagcctccctgcctccccaaggaaccggcacccccaagcccagagtcccattcacccagggacctggactccgaggttttctgtgattccctggagcagctggagcctgagctggtttggacagagcagcgggcagcatctggaggaaagcgtgatcccaggaacagccccgtgccccccacaaagaaagaggggttgcggggcagcccgccggggccccaggagttggacgtgtggctgctggggacagttcgagcactacaggagagcatgcaggaggtgcaggcgagggtgcagagcctggagagcatgccccggccccctgagcagaggccgcagcccaggcccagtgctcggccatggccccttgggctcccggggcccgcgctgctcttcttcctcctgtggcccttcgtcgtccagtggctcttccgaatgtttcggacccaaaagaggtgactgtcagtggaggggtctctgcagccaactgagactatcttgctgtgccctgagccttcctagggtttagaagaacagcattcaaaattccccgtcctgtcagtgtttgccttcgcacctcctcccctaaagcagcgcggggggcaaataagaccccacccctccctgcagcttcacagggacgcttccttccctccccgcaaccaccccaggctcccctgggaggctgcagttgtggtacacgtccccggtgctgggttggccgtgactcgggggcggggcgatcgggtctcagcccctgccttccccagtctctgggtcacccgaattttcccacccctgcttctccccgaggaggttgagctcttgagcaagttgggacttgggctggggcctggaagaatgattggctgggaggccgcgggagggaggccaggaggcccggaccagttgggaggagtgagcaggccccgggggagggggatgagcgcagtttgctcgctttcctcccctgccggccccctccgcccccacacacactcgggacgtcttcattgaagattcacttacaaaggaatgtttcactaaataaaagaaaaccag

SEQ ID NO: 31 - DNA, 7825 bp, Homo Sapiens
ccttttcgttcgccctctcggggcggcttcgccgaaggtagcgccgaatccggcaaccggagcctgggcgcgaagcgaagaagccggaacaaagtgagggggagccggccggctggcccgggaagccccaggggcgcaggggaagcgggactcgcgccgggcggggtttccctgcgccccggcgccccgcgggcagcatgcccctgcgggcagggggagctgggctgaactggccctcccgggggctcagcttgcgccctagagcccaccagatgtgcccccgccggggcccccgggttgcgtgaggacacctcctctgaggggcgccgcttgcccctctccggatcgcccggggccccggctggccagaggatggacgaggaggaggatggagcgggcgccgaggagtcgggacagccccggagcttcatgcggctcaacgacctgtcgggggccgggggccggccggggccggggtcagcagaaaaggacccgggcagcgcggactccgaggcggaggggctgccgtacccggcgctggccccggtggttttcttctacttgagccaggacagccgcccgcggagctggtgtctccgcacggtctgtaacccctggtttgagcgcatcagcatgttggtcatccttctcaactgcgtgaccctgggcatgttccggccatgcgaggacatcgcctgtgactcccagcgctgccggatcctgcaggcctttgatgacttcatctttgccttctttgccgtggagatggtggtgaagatggtggccttgggcatctttgggaaaaagtgttacctgggagacacttggaaccggcttgactttttcatcgtcatcgcagggatgctggagtactcgctggacctgcagaacgtcagcttctcagctgtcaggacagtccgtgtgctgcgaccgctcagggccattaaccgggtgcccagcatgcgcatccttgtcacgttgctgctggatacgctgcccatgctgggcaacgtcctgctgctctgcttcttcgtcttcttcatcttcggcatcgtcggcgtccagctgtgggcagggctgcttcggaaccgatgcttcctacctgagaatttcagcctccccctgagcgtggacctggagcgctattaccagacagagaacgaggatgagagccccttcatctgctcccagccacgcgagaacggcatgcggtcctgcagaagcgtgcccacgctgcgcggggacgggggcggtggcccaccttgcggtctggactatgaggcctacaacagctccagcaacaccacctgtgtcaactggaaccagtactacaccaactgctcagcgggggagcacaaccccttcaagggcgccatcaactttgacaacattggctatgcctggatcgccatcttccaggtcatcacgctggagggctgggtcgacatcatgtactttgtgatggatgctcattccttctacaatttcatctacttcatcctcctcatcatcgtgggctccttcttcatgatcaacctgtgcctggtggtgattgccacgcagttctcagagaccaagcagcgggaaagccagctgatgcgggagcagcgtgtgcggttcctgtccaacgccagcaccctggctagcttctctgagcccggcagctgctatgaggagctgctcaagtacctggtgtacatccttcgtaaggcagcccgcaggctggctcaggtctctcgggcagcaggtgtgcgggttgggctgctcagcagcccagcacccctcgggggccaggagacccagcccagcagcagctgctctcgctcccaccgccgcctatccgtccaccacctggtgcaccaccaccaccaccatcaccaccactaccacctgggcaatgggacgctcagggccccccgggccagcccggagatccaggacagggatgccaatgggtcccgccggctcatgctgccaccaccctcgacgcctgccctctccggggccccccctggtggcgcagagtctgtgcacagcttctaccatgccgactgccacttagagccagtccgctgccaggcgccccctcccaggtccccatctgaggcatccggcaggactgtgggcagcgggaaggtgtatcccaccgtgcacaccagccctccaccggagacgctgaaggagaaggcactagtagaggtggctgccagctctgggcccccaaccctcaccagcctcaacatcccacccgggccctacagctccatgcacaagctgctggagacacagagtacaggtgcctgccaaagctcttgcaagatctccagcccttgcttgaaagcagacagtggagcctgtggtccagacagctgcccctactgtgcccgggccggggcaggggaggtggagctcgccgaccgtgaaatgcctgactcagacagcgaggcagtttatgagttcacacaggatgcccagcacagcgacctccgggacccccacagccggcggcaacggagcctgggcccagatgcagagcccagctctgtgctggccttctggaggctaatctgtgacaccttccgaaagattgtggacagcaagtactttggccggggaatcatgatcgccatcctggtcaacacactcagcatgggcatcgaataccacgagcagcccgaggagcttaccaacgccctagaaatcagcaacatcgtcttcaccagcctctttgccctggagatgctgctgaagctgcttgtgtatggtccctttggctacatcaagaatccctacaacatcttcgatggtgtcattgtggtcatcagcgtgtgggagatcgtgggccagcaggggggcggcctgtcggtgctgcggaccttccgcctgatgcgtgtgctgaagctggtgcgcttcctgccggcgctgcagcggcagctggtggtgctcatgaagaccatggacaacgtggccaccttctgcatgctgcttatgctcttcatcttcatcttcagcatcctgggcatgcatctcttcggctgcaagtttgcctctgagcgggatggggacaccctgccagaccggaagaattttgactccttgctctgggccatcgtcactgtctttcagatcctgacccaggaggactggaacaaagtcctctacaatggtatggcctccacgtcgtcctgggcggccctttatttcattgccctcatgaccttcggcaactacgtgctcttcaatttgctggtcgccattctggtggagggcttccaggcggaggaaatcagcaaacgggaagatgcgagtggacagttaagctgtattcagctgcctgtcgactcccaggggggagatgccaacaagtccgaatcagagcccgatttcttctcacccagcctggatggtgatggggacaggaagaagtgcttggccttggtgtccctgggagagcacccggagctgcggaagagcctgctgccgcctctcatcatccacacggccgccacacccatgtcgctgcccaagagcaccagcacgggcctgggcgaggcgctgggccctgcgtcgcgccgcaccagcagcagcgggtcggcagagcctggggcggcccacgagatgaagtcaccgcccagcgcccgcagctctccgcacagcccctggagcgctgcaagcagctggaccagcaggcgctccagccggaacagcctcggccgtgcacccagcctgaagcggagaagcccaagtggagagcggcggtccctgttgtcgggagaaggccaggagagccaggatgaagaggagagctcagaagaggagcgggccagccctgcgggcagtgaccatcgccacagggggtccctggagcgggaggccaagagttcctttgacctgccagacacactgcaggtgccagggctgcatcgcactgccagtggccgagggtctgcttctgagcaccaggactgcaatggcaagtcggcttcagggcgcctggcccgggccctgcggcctgatgaccccccactggatggggatgacgccgatgacgagggcaacctgagcaaaggggaacgggtccgcgcgtggatccgagcccgactccctgcctgctgcctcgagcgagactcctggtcagcctacatcttccctcctcagtccaggttccgcctcctgtgtcaccggatcatcacccacaagatgttcgaccacgtggtccttgtcatcatcttccttaactgcatcaccatcgccatggagcgccccaaaattgacccccacagcgctgaacgcatcttcctgaccctctccaattacatcttcaccgcagtctttctggctgaaatgacagtgaaggtggtggcactgggctggtgcttcggggagcaggcgtacctgcggagcagttggaacgtgctggacgggctgttggtgctcatctccgtcatcgacattctggtgtccatggtctctgacagcggcaccaagatcctgggcatgctgagggtgctgcggctgctgcggaccctgcgcccgctcagggtgatcagccgggcgcaggggctgaagctggtggtggagacgctgatgtcctcactgaaacccatcggcaacattgtagtcatctgctgtgccttcttcatcattttcggcatcttgggggtgcagctcttcaaagggaagtttttcgtgtgccagggcgaggataccaggaacatcaccaataaatcggactgtgccgaggccagttaccggtgggtccggcacaagtacaactttgacaaccttggccaggccctgatgtccctgttcgttttggcctccaaggatggttgggtggacatcatgtacgatgggctggatgctgtgggcgtggaccagcagcccatcatgaaccacaacccctggatgctgctgtacttcatctcgttcctgctcattgtggccttctttgtcctgaacatgtttgtgggtgtggtggtggagaacttccacaagtgtcggcagcaccaggaggaagaggaggcccggcggcgggaggagaagcgcctacgaagactggagaaaaagagaaggaatctaatgctggacgatgtaattgcttccggcagctcagccagcgctgcgtcagaagcccagtgcaaaccttactactccgactactcccgcttccggctcctcgtccaccacttgtgcaccagccactacctggacctcttcatcacaggtgtcatcgggctgaacgtggtcaccatggccatggagcactaccagcagccccagattctggatgaggctctgaagatctgcaactacatcttcactgtcatctttgtcttggagtcagttttcaaacttgtggcctttggtttccgtcggttcttccaggacaggtggaaccagctggacctggccattgtgctgctgtccatcatgggcatcacgctggaggaaatcgaggtcaacgcctcgctgcccatcaaccccaccatcatccgcatcatgagggtgctgcgcattgcccgagtgctgaagctgctgaagatggctgtgggcatgcgggcgctgctggacacggtgatgcaggccctgccccaggtggggaacctgggacttctcttcatgttgttgtttttcatctttgcagctctgggcgtggagctctttggagacctggagtgtgacgagacacacccctgtgagggcctgggccgtcatgccacctttcggaactttggcatggccttcctaaccctcttccgagtctccacaggtgacaattggaatggcattatgaaggacaccctccgggactgtgaccaggagtccacctgctacaacacggtcatctcgcctatctactttgtgtccttcgtgctgacggcccagttcgtgctagtcaacgtggtgatcgccgtgctgatgaagcacctggaggagagcaacaaggaggccaaggaggaggccgagctagaggctgagctggagctggagatgaagaccctcagcccccagccccactcgccactgggcagccccttcctctggcctggggtcgagggccccgacagccccgacagccccaagcctggggctctgcacccagcggcccacgcgagatcagcctcccacttttccctggagcaccccacggacaggcagctgtttgacaccatatccctgctgatccagggctccctggagtgggagctgaagctgatggacgagctggcaggcccagggggccagccctctgccttcccttctgcccccagcctgggaggctccgacccacagatccctctagctgagatggaggctctgtctctgacgtcagagattgtgtctgaaccgtcctgctctctagctctgacggatgactctttgcctgatgacatgcacacactcttacttagtgccctggagagcaatatgcagccccaccccacggagctgccaggaccagacttactgactgtgcggaagtctggggtcagccgaacgcactctctgcccaatgacagctacatgtgtcggcatgggagcactgccgaggggcccctgggacacaggggctgggggctccccaaagctcagtcaggctccgtcttgtccgttcactcccagccagcagataccagctacatcctgcagcttcccaaagatgcacctcatctgctccagccccacagcgccccaacctggggcaccatccccaaactgcccccaccaggacgctcccctttggctcagaggccactcaggcgccaggcagcaataaggactgactccttggacgttcagggtctgggcagccgggaagacctgctggcagaggtgagtgggccctccccgcccctggcccgggcctactctttctggggccagtcaagtacccaggcacagcagcactcccgcagccacagcaagatctccaagcacatgaccccgccagccccttgcccaggcccagaacccaactggggcaagggccctccagagaccagaagcagcttagagttggacacggagctgagctggatttcaggagacctcctgccccctggcggccaggaggagcccccatccccacgggacctgaagaagtgctacagcgtggaggcccagagctgccagcgccggcctacgtcctggctggatgagcagaggagacactctatcgccgtcagctgcctggacagcggctcccaaccccacctgggcacagacccctctaaccttgggggccagcctcttggggggcctgggagccggcccaagaaaaaactcagcccgcctagtatcaccatagacccccccgagagccaaggtcctcggaccccgcccagccctggtatctgcctccggaggagggctccgtccagcgactccaaggatcccttggcctctggcccccctgacagcatggctgcctcgccctccccaaagaaagatgtgctgagtctctccggtttatcctctgacccagcagacctggacccctgagtcctgccccactttcccactcacctttctccactgggtgccaagtcctagctcctcctcctgggctatattcctgacaaaagttccatatagacaccaaggaggcggaggcgctcctccctgcctcagtggctctgggtacctgcaagcagaacttccaaagagagttaaaagcagcagccccggcaactctggctccaggcagaaggagaggcccggtgcagctgaggttcccgacaccagaagctgttgggagaaagcaatacgtttgtgcagaatctctatgtatattctattttattaaattaattgaatctag

SEQ ID NO: 32 - DNA, 3689 bp, Homo Sapiens
ggaagactacacattttaggtatgtgattagaaaacatacttgtcagaattgtctggctggattaatttgctaatttgaccttcttcatcatttgatgtgatgccagatactaatagcacaatcaatttatcactaagcactcgtgttactttagcattttttatgtccttagtagcttttgctataatgctaggaaatgctttggtcattttagcttttgtggtggacaaaaaccttagacatcgaagtagttatttttttcttaacttggccatctctgacttctttgtgggtgtgatctccattcctttgtacatccctcacacgctgttcgaatgggattttggaaaggaaatctgtgtattttggctcactactgactatctgttatgtacagcatctgtatataacattgtcctcatcagctatgatcgatacctgtcagtctcaaatgctgtgtcttatagaactcaacatactggggtcttgaagattgttactctgatggtggccgtttgggtgctggccttcttagtgaatgggccaatgattctagtttcagagtcttggaaggatgaaggtagtgaatgtgaacctggatttttttcggaatggtacatccttgccatcacatcattcttggaattcgtgatcccagtcatcttagtcgcttatttcaacatgaatatttattggagcctgtggaagcgtgatcatctcagtaggtgccaaagccatcctggactgactgctgtctcttccaacatctgtggacactcattcagaggtagactatcttcaaggagatctctttctgcatcgacagaagttcctgcatcctttcattcagagagacagaggagaaagagtagtctcatgttttcctcaagaaccaagatgaatagcaatacaattgcttccaaaatgggttccttctcccaatcagattctgtagctcttcaccaaagggaacatgttgaactgcttagagccaggagattagccaagtcactggccattctcttaggggtttttgctgtttgctgggctccatattctctgttcacaattgtcctttcattttattcctcagcaacaggtcctaaatcagtttggtatagaattgcattttggcttcagtggttcaattcctttgtcaatcctcttttgtatccattgtgtcacaagcgctttcaaaaggctttcttgaaaatattttgtataaaaaagcaacctctaccatcacaacacagtcggtcagtatcttcttaaagacaattttctcacctctgtaaattttagtctcaatctcacctaaatgaatcaggtctgccctttatcttgcccttttcattctaccaacagatctgcactttgaagtcaatggtaaattactccagtgaataatagcagtataatatgacttgataatatttttgtaaacttgtagtcataatagtactatattcttcttagtcctcacctcttccttgtcttttagatcttaatttcatgctgattacaaaaatccagttttgttttctttctatgttccatgcataatacagtcttaagtgaatttctcttttttaattttatcgtaatagaaacttatccagtttgaaaatcattccctaaagcatgcaataggaaaaagaacctcctggctgggactgcccaactctgttctgatcagtgggtgggtgaggtagggtttgagttggcaagagcagggaacgggcatgtgcccaggtgagctcctgtgtgtgtccagattttatattcctaatcccagtaaggaagaaagcgtagtgtgggagaggagagagctgatgactgcagttctcaaaggtcctcagtgaagttattttggaggccctggtggtcacaggatcagaaggcaagggataggcagtggtcaccaatggttgaaagtatggcttgtcccatttcttcctgttctctttttctagcttccacatcagcttccttttttgagaacatatagaagaagaaggctaagagatggtgaagagactgcatgattaaactagatagacctggtatacagtcactgaactagtagatgtcaataattattatttttaaaaatttttatttgttggccgggcatggtggctcacgcctgaaatcccagcactttgggaggccaaggtgggcggatcatgaggtcaggagatcgagaccatcctggccaacatggtgaaaccccatctgtactaaaatacaaacaagtagctggttgtggcgccgcatgcctgtagtcccagctactcgggaggctgaggcaggggaattgcttgaacccgggaggcggagttttgccagcctggcaacagagcaagactctgtctaaaaagaaaaaaaaatttttttgtttgagacagcatcttgctctgtctcccaggctggagcgtagtaatgcaatcatagctcactgcagcctggaactccttggctcaagcaatcctgctgccttggcctcccaagtatgtgggactacaggtactcgccaccacacctggataattaaaaaattatttctgtagagatgaagtctcactgtgttgcccagcctgggtgtcaataattattttttaaaaaaaatttttaaaaaggttttttgagacagattcttgctctgtcacccaggctggagtgcagtagcatgatcagggatcactgcaacctctgcctcctgggttcaagcgattcttgtgcctaagccacctgagcagctgggattgcaggtgcatgccaccatgcctggctaattttggtatttttagtagagatgaggttttgccattttggtcaggctggaattttttttttttttaattttgataagacagggtattgccgtgttggccagactggtctcaaactcctgggctgaaacaatcctcccgccttggcctcccaaagtgctgggattataggcacaagacaccacaataattattgcctgtatgtcaattattattttaaaatattgttgtatttacttaatgtctttaatgcatttgcccaatattttacattgttactgctcagaggtattcctttattatgtggttagcataggttatactttgctgacgattcacattttattagtttggttatgttttgtccttttaaaacattttcttttgagatgggggtcttgctctgttgcccacgcaggagtgcagtggcatgctctcagctcactgcagccctgactgcctaggctccagcaatcttcttacgtcagcctccagagtagctgggaccgcaggcacttgccaccacgccccactaaaaattttttaaattgttgcctttcttgaagtgttctctgcctgtctttgtcacaaaatttcatttttctcatagttaatttcatctctccggtaagattttattggtgtttcttttataactttgcagttcttacaccgtttggtgattttcatgtttcttagaaactttaaacctttaacttcaaacattaaaatacaagtcttttaagtacatgagtgcttagaaatgtacataatgtttatatacacttatgccttacattaaagtccaatatgagaaatacatgtttaacattcaataataattttaaaaatttgagaaataaactctcataaatgcaaaaaaaaaaaaaaaaaaa

SEQ ID NO: 33 - DNA, 3273 bp, Homo Sapiens
actggagtctctgagcagccattgaaggggaaggaactgcgggtgtgtgtgtgtatgtgtgtgtgtatgtgtgtgcgcgcgtgcgtgcgtgtgtgtgcgcgcgctagtgtgtggacaaggaggtgggggcagctgagttagagtcccaactcttggactccatttgctattctcttctttctcccccacacctatctggtggtggtagtgggcgtttatatttgcgttccttttcattcatttctaaatctcttaaaaattttgggttgggggtattggggaaggcaggaaagggaaaaggagagtagtagctgaagagcaagaggaggacatggagatgaagaagaagattaacctggagttaaggaacagatccccggaggaggtgacagagttagtccttgataattgcctgtgtgtcaatggggaaattgaaggcctgaatgatactttcaaagaactagaatttctgagtatggctaatgtggaactaagttcgctggcccggcttcccagcttaaataaacttcgaaaattggagcttagtgataatataatttctggaggcttggaagtcctggcagagaaatgtccaaatcttacctacctcaatctgagtggaaacaaaataaaagatctcagtacagtagaagctctgcaaaatcttaaaaatttgaaaagtcttgacctgtttaactgtgagatcacaaacctggaagattatagagaaagtatttttgaactactgcagcaaatcacatacttagatggatttgatcaggaggataatgaagcgccggactctgaagaggaggatgatgaggatggcgatgaagatgatgaagaggaagaggaaaatgaagctggtccaccggaaggatatgaggaagaggaggaggaagaggaagaggaggatgaggatgaggatgaagatgaagatgaagcaggttcagagttgggagagggagaagaggaagtgggcctctcatacttaatgaaagaagaaattcaggatgaagaagatgatgatgactatgttgaagaaggggaagaagaggaagaagaggaagaaggaggtcttcgaggggagaagaggaaacgagatgctgaagacgatggagaggaagaagatgactagatcattctaagaccagattctctaatgtttctgggtgtgcaatagagtgatcacatctttgtttcttcatgtacgatagctatccctacagaagataatgtgtaactttttataggaaaagtgtggttttactatttttgccttatcattccaaataagaactagtctgttaatgatcatattgtatgtagagaaaaattttcattgactcccattgtggaattccctagcaatttatttagacttaattttttaaattcaagcttactgtattagtcatttttagcccataattaaaacatgatcacttttacacaggtgtagtatggtgcatttcattccttatttataaattaactgaaattacagtttgctataatataaaatgacaatagtctcttgagtggtaagttggttatttttttagaggtgatccaggaatctttagtttgaaggcagttaccttttttttttttttttttttgactaagagtgtttggttgcttttttgtcacaagtaacttggaaaatagaagcagaatagtaaaggttctattcagcaacatagttcatggattttgtggaggttctattcagtaatatggttcatggatttagtggtgactgataagattttatttttgaaggaaaaattgcttatactaagtccagagacatgcaggtgagcccttttgtcaggctgcaaatcatgacatgccgatggttgtttattttgtttttaggtgtgcattctttttcttcttagcaattcctttatgatcaccttcccttcttgtttcactccctcccgctctctcaaaaggaacttgggaaacttgtgaaacccaggaaaacctttagtcttatacctcaactacctttcagtcctgtctgggttttaaataagtgaagtagaagaaattgagtattttctgacataagaatatattatcaatacagttttatgcagtaagctctccttaccataaatgtttcttggttgacaacatctaagacaatattagtgggatgaagaaagaaaagcaggggtgcttttggaagcagtgttagtgttcctcaaaagtcggaacaattgcctgttgatatattaataagacattaaagtcaaattttaatgttggcctctcaaatgatttggataccactctgcaaagtatttctaacctttaattcccagttttaaaacagatataataatagcatttaattggaatatactaggcagctggaaaagtatttgaaactaaattgacattaaaattaagatttgttttcaagtggatgtccattaaaagtagaaaaatatttgggataagtgagtgtgtatttccttacatggctactaaataaaatataatgagtatacaagtatatctcctcttttgctatggaggctccatgttcaaggcaatggctttttaaatcttggctatctaaaattttttccctttgttttgaatatttgtaagtttttaagaagttagtgtcagcaaattaattgaagttatgcttctatactgggacatatttaaatactgagtatagtactgctgctactgcttctacaatgtaaaatgtatgacttggtgttttaaagtaaaaattatgatgttacttgtggagaaactaaaaatgttgtacaactgaccgaaagaaaacccttggggataagtttagtgaggggattggaatccccaaaaagataacatttttcttctgcttttaaaaactgaaattccctgttctagttcctaacaattctcattacatactatgccagattacaaaatacttatttttaaaatgaaatctatatattgactttcttatcaatcatcttactgtgcaatcaaaattagagtactttggtttgaaaacaacacttagagcctccagataacttttaagacttatttagctttgtgggtggtattttcatgcaaataagtaagggtgggttttatattttgtagaagttttcggtcctattttaatgcttttgtatggcagtatgtatatattgtgttaagttcctcaagaatctccttaaaaactttgaagttaatacttttgtgcaactgtgttttgaataaagccatgacagtgttaaaaac

SEQ ID NO: 34 - DNA, 470 bp, Homo Sapiens
gggaccgctataaggccagtcggactgcgacatagcccatcccctcgaccgctcgcgtcgcatttggccgcctccctaccgctccaagcccagccctcagccatggcatgccccctggatcaggccattggcctcctcgtggccatcttccacaagtactccggcagggagggtgacaagcacaccctgagcaagaaggagctgaaggagctgatccagaaggagctcaccattggctcgaagctgcaggatgctgaaattgcaaggctgatggaagacttggaccggaacaaggaccaggaggtgaacttccaggagtatgtcaccttcctgggggccttggctttgatctacaatgaagccctcaagggctgaaaataaatagggaagatggagacacctctgggggtcctctctgagtcaaatccagtggtgggtaattgtacaataaattttttttggtcaaattt

SEQ ID NO: 35 - DNA, 80 bp, Homo Sapiens
ctacctacgatctgactagcacgggtgagttgatccgtcactcttagtggtgaaccttgtgcttactctcatgtagttcc

SEQ ID NO: 36 - DNA, 2460 bp, Homo Sapiens
ggccagctggacgggcacaccatgaggctgctgaccctcctgggccttctgtgtggctcggtggccacccccttgggcccgaagtggcctgaacctgtgttcgggcgcctggcatcccccggctttccaggggagtatgccaatgaccaggagcggcgctggaccctgactgcaccccccggctaccgcctgcgcctctacttcacccacttcgacctggagctctcccacctctgcgagtacgacttcgtcaagctgagctcgggggccaaggtgctggccacgctgtgcgggcaggagagcacagacacggagcgggcccctggcaaggacactttctactcgctgggctccagcctggacattaccttccgctccgactactccaacgagaagccgttcacggggttcgaggccttctatgcagccgaggacattgacgagtgccaggtggccccgggagaggcgcccacctgcgaccaccactgccacaaccacctgggcggtttctactgctcctgccgcgcaggctacgtcctgcaccgtaacaagcgcacctgctcagccctgtgctccggccaggtcttcacccagaggtctggggagctcagcagccctgaatacccacggccgtatcccaaactctccagttgcacttacagcatcagcctggaggaggggttcagtgtcattctggactttgtggagtccttcgatgtggagacacaccctgaaaccctgtgtccctacgactttctcaagattcaaacagacagagaagaacatggcccattctgtgggaagacattgccccacaggattgaaacaaaaagcaacacggtgaccatcacctttgtcacagatgaatcaggagaccacacaggctggaagatccactacacgagcacagcgcagccttgcccttatccgatggcgccacctaatggccacgtttcacctgtgcaagccaaatacatcctgaaagacagcttctccatcttttgcgagactggctatgagcttctgcaaggtcacttgcccctgaaatcctttactgcagtttgtcagaaagatggatcttgggaccggccaatgcccgcgtgcagcattgttgactgtggccctcctgatgatctacccagtggccgagtggagtacatcacaggtcctggagtgaccacctacaaagctgtgattcagtacagctgtgaagagaccttctacacaatgaaagtgaatgatggtaaatatgtgtgtgaggctgatggattctggacgagctccaaaggagaaaaatcactcccagtctgtgagcctgtttgtggactatcagcccgcacaacaggagggcgtatatatggagggcaaaaggcaaaacctggtgattttccttggcaagtcctgatattaggtggaaccacagcagcaggtgcacttttatatgacaactgggtcctaacagctgctcatgccgtctatgagcaaaaacatgatgcatccgccctggacattcgaatgggcaccctgaaaagactatcacctcattatacacaagcctggtctgaagctgtttttatacatgaaggttatactcatgatgctggctttgacaatgacatagcactgattaaattgaataacaaagttgtaatcaatagcaacatcacgcctatttgtctgccaagaaaagaagctgaatcctttatgaggacagatgacattggaactgcatctggatggggattaacccaaaggggttttcttgctagaaatctaatgtatgtcgacataccgattgttgaccatcaaaaatgtactgctgcatatgaaaagccaccctatccaaggggaagtgtaactgctaacatgctttgtgctggcttagaaagtgggggcaaggacagctgcagaggtgacagcggaggggcactggtgtttctagatagtgaaacagagaggtggtttgtgggaggaatagtgtcctggggttccatgaattgtggggaagcaggtcagtatggagtctacacaaaagttattaactatattccctggatcgagaacataattagtgatttttaacttgcgtgtctgcagtcaaggattcttcatttttagaaatgcctgtgaagaccttggcagcgacgtggctcgagaagcattcatcattactgtggacatggcagttgttgctccacccaaaaaaacagactccaggtgaggctgctgtcatttctccacttgccagtttaattccagccttacccattgactcaaggggacataaaccacgagagtgacagtcatctttgcccacccagtgtaatgtcactgctcaaattacatttcattaccttaaaaagccagtctcttttcatactggctgttggcatttctgtaaactgcctgtccatgctctttgtttttaaacttgttcttattgaaaaaaaaaaaaaaaaa

SEQ ID NO: 37 - DNA, 3578 bp, Homo Sapiens
acttccggacgggactcccctctgtccgcgcctcacatctccccttcctctcgcctagtcctgtgccgttttccgtccgcgactcttccggcccagagctttcggagtgcggttgctcaggggaagccgtcgccgcccccgcctcggggccgagtgagagtgcccgtcgcgtcgcgccgcgtcgccccccgggccgcctccttgccgccagtggcgggctccgttctccctcgaagcactccccccagctccatgaatggaaatcggctccgcaggacccgctggggcccagcccctactcatggtgcccagaagacctggctatggcaccatgggcaaacccattaaactgctggctaactgttttcaagttgaaatcccaaagattgatgtctacctctatgaggtagatattaaaccagacaagtgtcctaggagagtgaacagggaggtggttgactcaatggttcagcattttaaagtaactatatttggagaccgtagaccagtttatgatggaaaaagaagtctttacaccgccaatccacttcctgtggcaactacaggggtagatttagacgttactttacctggggaaggtggaaaagatcgacctttcaaggtgtcaatcaaatttgtctctcgggtgagttggcacctactgcatgaagtactgacaggacggaccttgcctgagccactggaattagacaagccaatcagcactaaccctgtccatgccgttgatgtggtgctacgacatctgccctccatgaaatacacacctgtggggcgttcatttttctccgctccagaaggatatgaccaccctctgggagggggcagggaagtgtggtttggattccatcagtctgttcggcctgccatgtggaaaatgatgcttaatatcgatgtttctgccactgccttctacaaagcacaacctgtaattcagttcatgtgtgaagttcttgatattcataatattgatgagcaaccaagacctctgactgattctcatcgggtaaaattcaccaaagagataaaaggtttgaaggttgaagtgactcattgtggaacaatgagacggaaataccgtgtttgtaatgtaacaaggaggcctgccagtcatcaaacctttcctttacagttagaaaacggccaaactgtggagagaacagtagcgcagtatttcagagaaaagtatactcttcagctgaagtacccgcaccttccctgtctgcaagtcgggcaggaacagaaacacacctacctgccactagaagtctgtaatattgtggcagggcaacgatgtatcaagaagctaacagacaatcagacttccactatgatcaaggcaacagcaagatctgcaccagatagacaagaggaaattagcagattggtaagaagtgcaaattatgaaacagatccatttgttcaggagtttcaatttaaagttcgggatgaaatggctcatgtaactggacgcgtacttccagcacctatgctccagtatggaggacggaatcggacagtagcaacaccgagccatggagtatgggacatgcgagggaaacaattccacacaggagttgaaatcaaaatgtgggctatcgcttgttttgccacacagaggcagtgcagagaagaaatattgaagggtttcacagaccagctgcgtaagatttctaaggatgcagggatgcccatccagggccagccatgcttctgcaaatatgcacagggggcagacagcgtagagcccatgttccggcatctcaagaacacatattctggcctacagcttattatcgtcatcctgccggggaagacaccagtgtatgcggaagtgaaacgtgtaggagacacacttttgggtatggctacacaatgtgttcaagtcaagaatgtaataaaaacatctcctcaaactctgtcaaacttgtgcctaaagataaatgttaaactcggagggatcaataatattcttgtacctcatcaaagaccttctgtgttccagcaaccagtgatctttttgggagccgatgtcactcatccacctgctggtgatggaaagaagccttctattgctgctgttgtaggtagtatggatgcacacccaagcagatactgtgccacagtaagagttcagagaccccgacaggagatcatccaggacttggcctccatggtccgggaacttcttattcaattttataagtcaactcggttcaagcctactcgtatcatcttttatcgggatggtgtttcagaggggcagtttaggcaggtattatattatgaactactagcaattcgagaagcctgcatcagtttggagaaagactatcaacctggaataacctacattgtagttcagaagagacatcacactcgattattttgtgctgataggacagaaagggttggaagaagtggcaatatcccagctggaacaacagttgatacagacattacacacccatatgagttcgatttttacctctgtagccatgctggaatacagggtaccagtcgtccttcacactatcatgttttatgggatgataactgctttactgcagatgaacttcagctgctaacttaccagctctgccacacttacgtacgctgtacacgatctgtttctatacctgcaccagcgtattatgctcacctggtagcatttagagccagatatcatcttgtggacaaagaacatgacagtgctgaaggaagtcacgtttcaggacaaagcaatgggcgagatccacaagctcttgccaaggctgtacagattcaccaagataccttacgcacaatgtacttcgcttaaatagtccaagtatattctctgagaggaagtactgaaagatgaattgacatacaacgtatgtttccagtgaagtcaattgagtaaggacacctccagccatacagaaaccaacactgtgtgggggccaaggtctgatccttatgttaatacaaggaagattgtttacttcatcaaggaacacagcatcattatgcaatatgaaaccagccaactgctttttgtgcggtctcctataggaagtatcgcaattgttttgttttcatttcttgtagtctaacccttttaatgcctttacctcaagttgcttggcagcacaactatctttgcaaaaaaaagtaaagaaaaagtaaatgatggtttaaaaaatacacaccttcatgaataatcaaagtgatttttcagaattatgtgtgcaaaaaattaatgtgcattcatatattcttgtaaaaggtgtctgtgtatttttaaaatatatacatccatacttcatatgcatatatatctagatctggattgataatagatatatatgtgtctgttatatattttagagttcattccattggggaattttctttcccttttattctacccccactaccgcctttatttctctatttcccttgccttcatcacctacatttttttcccagtcctaccagtgacattcaaatgttgatgtatctggttcgtttgaatataaaatatggcaaactaaaaaaaaaaaaaaaaaaaaaaa

SEQ ID NO: 38 - DNA, 2409 bp, Homo Sapiens
atgcggggcgtgtggccgcccccggtgtccgccctgctgtcggcgctggggatgtcgacgtacaagcgggccacgctggacgaggaggacctggtggactcgctctccgagggcgacgcataccccaacggcctgcaggtgaacttccacagcccccggagtggccagaggtgctgggctgcacggacccaggtggagaagcggctggtggtgttggtggtacttctggcggcaggactggtggcctgcttggcagcactgggcatccagtaccagacaagatccccctctgtgtgcctgagcgaagcttgtgtctcagtgaccagctccatcttgagctccatggaccccacagtggacccctgccatgacttcttcagctacgcctgtgggggctggatcaaggccaacccagtccctgatggccactcacgctgggggaccttcagcaacctctgggaacacaaccaagcaatcatcaagcacctcctcgaaaactccacggccagcgtgagcgaggcagagagaaaggcgcaagtatactaccgtgcgtgcatgaacgagaccaggatcgaggagctcagggccaaacctctaatggagttgattgagaggctcgggggctggaacatcacaggtccctgggccaaggacaacttccaggacaccctgcaggtggtcaccgcccactaccgcacctcacccttcttctctgtctatgtcagtgccgattccaagaactccaacagcaacgtgatccaggtggaccagtctggcctgggcttgccctcgagagactattacctgaacaaaactgaaaacgagaaggtgctgaccggatatctgaactacatggtccagctggggaagctgctgggcggcggggacgaggaggccatccggccccagatgcagcagatcttggactttgagacggcactggccaacatcaccatcccacaggagaagcgccgtgatgaggagctcatctaccacaaagtgacggcagccgagctgcagaccttggcacccgccatcaactggttgccttttctcaacaccatcttctaccccgtggagatcaatgaatccgagcctattgtggtctatgacaaggaataccttgagcagatctccactctcatcaacaccaccgacagatgcctgctcaacaactacatgatctggaacctggtgcggaaaacaagctccttccttgaccagcgctttcaggacgccgatgagaagttcatggaagtcatgtacgggaccaagaagacctgtcttcctcgctggaagttttgcgtgagtgacacagaaaacaacctgggctttgcgttgggccccatgtttgtcaaagcaaccttcgccgaggacagcaagagcatagccaccgagatcatcctggagattaagaaggcatttgaggaaagcctgagcaccctgaagtggatggatgaggaaacccgaaaatcagccaaggaaaaggccgatgccatctacaacatgataggataccccaacttcatcatggatcccaaggagctggacaaagtgtttaatgactacactgcagttccagacctctactttgaaaatgccatgcggtttttcaacttctcatggagggtcactgccgatcagctcaggaaagcccccaacagagatcagtggagcatgaccccgcccatggtgaacgcctactactcgcccaccaagaatgagattgtgtttccggccgggatcctgcaggcaccattctacacacgctcctcacccaaggccttaaactttggtggcataggtgtcgtcgtgggccatgagctgactcatgcttttgatgatcaaggacgggagtatgacaaggacgggaacctccggccatggtggaagaactcatccgtggaggccttcaagcgtcagaccgagtgcatggtagagcagtacagcaactacagcgtgaacggggagccggtgaacgggcggcacaccctgggggagaacatcgccgacaacgggggtctcaaggcggcctatcgggcttaccagaactgggtgaagaagaacggggctgagcactcgctccccaccctgggcctcaccaataaccagctcttcttcctgggctttgcacaggtctggtgctccgtccgcacacctgagagctcccacgaaggcctcatcaccgatccccacagcccctctcgcttccgggtcatcggctccctctccaattccaaggagttctcagaacacttccgctgcccacctggctcacccatgaacccgcctcacaagtgcgaagtctggtaaggacgaagcggagagagccaagacggaggaggggaaggggctgaggacgagacccccatccagcctccagggcattgctcagcccgcttggccacc

SEQ ID NO: 39 - DNA, 1077 bp, Homo Sapiens
atgagtgatcagcagctggactgtgccttggacctaatgaggcgcctgcctccccagcaaatcgagaaaaacctcagcgacctgatcgacctggtccccagtctatgtgaggatctcctgtcttctgttgaccagccactgaaaattgccagagacaaggtggtgggaaaggattaccttttgtgtgactacaacagagatggggactcctataggtcaccatggagtaacaagtatgaccctcccttggaggatggggccatgccgtcagctcggctgagaaagctggaggtggaagccaacaatgcctttgaccagtatcgagacctgtattttgaaggtggcgtctcatctgtctacctctgggatctggatcatggctttgctggagtgatcctcataaagaaggctggagatggatcaaagaagatcaaaggctgctgggattccatccacgtggtagaagtgcaggagaaatccagcggtcgcaccgcccattacaagttgacctccacggtgatgctgtggctgcagaccaacaaatctggctctggcaccatgaacctcggaggcagccttaccagacagatggagaaggatgaaactgtgagtgactgctccccacacatagccaacatcgggcgcctggtagaggacatggaaaataaaatcagaagtacgctgaacgagatctactttggaaaaacaaaggatatcgtcaatgggctgaggtctgtgcagacttttgcagacaaatcaaaacaagaagctctgaagaatgacctggtggaggctttgaagagaaagcagcaatgctaaacctctgtttcatgctaaccagacacgccgtgcactcgttagattcctttcttagaaaactcgttttctgctcccttccctcgtcccttccctccccgacaggtcacataacagctgcatcattgaccgcacagcgccatctctccctgagaataaagccgatagccacctcctccggctccgagcctgcttctgccacacctcgctctcagtctctccacatttccatagagaccgtgtggtttttgttcacccggg

SEQ ID NO: 40 - DNA, 1607 bp, Homo Sapiens
gctctgtagcacccaggagcggggaagcgaagtgcgagagaccccggaccccagcgctgtctcttcccgccgcccgaaccaccatgacccacttcaacaagggcccttcctatgggctctcggccgaagtcaagaacaagattgcttccaagtatgatcatcaggcagaagaagatcttcgcaattggatagaagaggtgacaggcatgagcattggccccaacttccagctgggcttaaaggatggcatcatcctctgcgaacttataaacaagctacagccaggctcagtgaagaaggtcaacgagtcctcactgaactggcctcagttggagaatattggcaactttattaaagctattcaggcttatggtatgaagccacatgacatattcgaagcaaatgatctttttgagaatggaaacatgacccaggttcagactactctggtggctctagcaggtctggctaaaacaaaaggattccatacaaccattgacattggagttaagtatgcagaaaaacaaacaagacgttttgatgaaggaaaattaaaagctggccaaagtgtaattggtctgcagatgggaaccaacaaatgtgccagccaggcaggtatgacagcttacgggactaggaggcatctttatgatcccaaaatgcaaactgacaaaccttttgaccagaccacaattagtctgcagatgggcactaataaaggagccagccaggcagggatgttagcaccaggtaccagaagagacatctatgatcagaagctaacattacagccggtggacaactcgacaatttccctacagatgggtaccaacaaagttgcttcccagaaaggaatgagtgtgtatgggcttgggcggcaagtatatgatcccaaatactgtgctgctcctacagaacctgtcattcacaacggaagccaaggaacaggaacaaatggttcggaaatcagtgatagtgattatcaggcagaataccctgatgagtatcatggcgagtaccaggatgactaccccagagattaccaatatagcgaccaaggcattgattattagatccacacagaaggagctcagtatttagtcctttgtttttattcagtgagaaccaagctagccttgagtaatttttatcttgtcttcctaaaacactattaagcttattgtacttttaagaaaaattgccttacgtacattcctttttcctttttctgcctcttccctcaatagttgccttttagtgctgtaataggttaaatcctacagcataatcaataactcgcatatgaagtaaaaaggaatactgtgaaaggggagtactcttgtacagccagttcttttatgcaaaaatctatgcatttttacaatcttatattaaactggtattttcaaacaataggaaactttttttttttttttttacagtttagtgtatctggtttctacatggaagactaaactcatgcttattgctaaatgtggtctttgccaactaaatttaagatgcagcattttagaaatttacatatcaatgtttctacagtattgtttgctaatttttaaataaagtcatgatcagtgtgaaaaaaa

SEQ ID NO: 41 - DNA, 2157 bp, Homo Sapiens
atgagagctgtactggacacagcagacattgccatagtggccctgtattttatcctggtcatgtgcattggtttttttgccatgtggaaatgtaatagaagcaccgtgagtggatacttcctggcggggcgctctatgacctgggtaacaattggtgcctctctgtttgtgagcaatattgggagtgagcacttcattgggctggcaggatctggagctgcaagtggatttgcagtgggcgcatgggaattcaatgccttactgcttttacaacttctgggatgggttttcatcccaatttacatccggtcaggggtatataccatgcctgaatacttgtccaagcgatttggtggccataggattcaggtctattttgcagccttgtctctgattctctatattttcaccaagctctcggtggatctgtattcgggtgccctttttatccaggagtctttgggttggaatctttatgtgtctgtcatcctgctcattggcatgactgctttgctgactgtcaccggaggccttgttgcagtgatctacacagacactctgcaggctctgctcatgatcattggggcacttacacttatgattattagcataatggagattggcgggtttgaggaagttaagagaaggtacatgttggcctcacccgatgtcacttccatcttattgacatacaacctttccaacacaaattcttgtaatgtctcccctaagaaagaagccctgaaaatgctgcggaatccaacagatgaagatgttccttggcctggattcattcttgggcagaccccagcttcagtatggtactggtgtgctgaccaagtcatcgtgcagagggtccttgcagccaaaaacattgctcatgccaaaggctctactcttatggctggcttcttaaagctcctgccaatgtttatcatagttgtcccaggaatgatttccaggatactgtttactgatgatatagcttgcatcaacccagagcactgcatgctggtgtgtggaagcagagctggttgctccaatattgcttacccacgcctggtgatgaagctggttcctgtgggccttcggggtttaatgatggcagtgatgattgcagctctgatgagtgacttagactctatctttaacagtgccagtaccatattcaccctcgatgtgtacaaacttatccgcaagagcgcaagctcccgggagttaatgattgtggggaggatatttgtggcatttatggtggtgatcagcatagcatgggtgccaatcatcgtggagatgcaaggaggccagatgtacctttacattcaggaggtagcagattacctgacacccccagtggcagccttgttcctgctggcaattttctggaagcgctgcaatgaacaaggggctttctatggtggaatggctggctttgttcttggagcagtccgtttgatactggcctttgcctaccgtgccccagaatgtgaccaacctgataataggccgggcttcatcaaagacatccattatatgtatgtggccacaggattgttttgggtcacgggactcattactgtaattgtgagccttctcacaccacctcccacaaaggaacagattcgaaccaccaccttttggtctaagaagaacctggtggtgaaggagaactgctccccaaaagaggaaccataccaaatgcaagaaaagagcattctgagatgcagtgagaataatgagaccatcaaccacatcattcccaacgggaaatctgaagacagcattaagggccttcagcctgaagatgttaatctgttggtaacctgcagagaggagggcaacccagtggcatccttaggtcattcagaggcagaaacaccagttgacgcttactccaatgggcaagcagctctcatgggtgagaaagagagaaagaaagaaacggatgatggaggtcggtactggaagttcatagactggttttgtggctttaaaagtaagagcctcagcaagaggagtctcagagacctgatggaagaggaggctgtttgtttacagatgctagaagagactcggcaagttaaagtaatactaaatattggactttttgctgtgtgttcacttggaattttcatgtttgtttatttctccttatga

SEQ ID NO: 42 - DNA, 1892 bp, Homo Sapiens
agggtacgggccgggaccgccgcagcccggggcgggggcacggcaaccgcgaggcctgggggcgcccgccccccgcgccccacgcccggtgccagcgagccgaggcgtgcatctccttatatggtcaaatgacacggcggggtttctcgagggcgggagctgcgcagcgctccactcggccggcagcggagccgcagccaccagccgcccgcgccctccagccccgtccgggagtccccggcccgctgcggtgccgtgagtacctccaaccccctgcgccccggagggaggccgaggggcttagccaccagggctcggaagtgggggccgaatccggtgcgagacccaaggagaggggagcagagccggagttggggagactgtggctgaaaactgtgtcttcctggagactaggctggcattttgactttgggacggagtctcgctttgtcgcccaggctggagtgcagtggcacgatctcagctcactgcaagctctacctcttggttcacgccattctcctgccccagcctcccaagtagctgggactacaggttgctgaaaagccaggagtcaaaatgactgagcgctttgactgccaccattgcaacgaatctctctttggcaagaagtacatcctgcgggaggagagcccctactgcgtggtgtgctttgagaccctgttcgccaacacctgcgaggagtgtgggaagcccatcggctgtgactgcaaggacttgtcttacaaggaccggcactggcatgaagcctgtttccactgctcgcagtgcagaaactcactggtggacaagccctttgctgccaaggaggaccagctgctctgtacagactgctattccaacgagtactcatccaagtgccaggaatgcaagaagaccatcatgccaggtacccgcaagatggagtacaagggcagcagctggcatgagacctgcttcatctgccaccgctgccagcagccaattggaaccaagagtttcatccccaaagacaatcagaatttctgtgtgccctgctatgagaaacaacatgccatgcagtgcgttcagtgcaaaaagcccatcaccacgggaggggtcacttaccgggagcagccctggcacaaggagtgcttcgtgtgcaccgcctgcaggaagcagctgtctgggcagcgcttcacagctcgcgatgactttgcctactgcctgaactgcttctgtgacttgtatgccaagaagtgtgctgggtgcaccaaccccatcagcggacttggtggcacaaaatacatctcctttgaggaacggcagtggcataacgactgctttaactgtaagaagtgctccctctcactggtggggcgtggcttcctcacagagagggacgacatcctgtgccccgactgtgggaaagacatctgaattcaacacagagaagttgctgcttgtgatctcacacacagatttttatgttttctttctcacccaggcaatcttgccttctggtttcttccagccacattgagactttcttctagtgcttttcagtgatactcacgtttgcttaaaccctttagtgctttgtgatagttcagtcccagggaaagagaaaactcgccctaggccctaggtgggaagatggtttgaaatttttgtaatcgagtaaggcacacccaaatgtaaaaatccttttgaatgatgcctttataaatctttctctcactgtctatttaagtgcaattaacatatgtcacgaacttgaaagttttctaaactcaataaggtaatgaccagttgttatttacagctctgtaacctcccgttgcgtcaagtctaaaccaagattatgtgacttgcaataaagttattcagaacagaaaaaaaaaaaaaaaaaa

SEQ ID NO: 43 - DNA, 3239 bp, Homo Sapiens
gcttggggaacgaggagcaggacgcggcctcggtggggcccgggccgaacggctgcggacacctgggcgccgaggagccgagcgccgccgtctccggcatggatcagtgcgtgacggtggagcgcgagctggagaaggtgctgcacaagttctcaggctacgggcagctgtgcgagcgcggcctggaggagctcatcgactacaccggcggcctcaagcacgagatcctgcagagccacggccaagatgctgaattatcagggacactttcacttgttttgacacagtgctgtaaaagaataaaggatactgttcaaaaattggcctccgaccacaaagacatccacagcagtgtttctcgggttggaaaagccattgataagaattttgattctgacattagcagtgtgggaatagatggctgctggcaggcagacagccaaaggcttctcaatgaagtgatggtggagcacttctttcgacaaggaatgctggatgtggctgaggagctctgtcaggaatctggtctttctgtagacccaagtcagaaggaaccatttgtggagttaaatagaatattagaggcattaaaggtcagagttctgagacctgctctggagtgggcagtgtcaaaccgggaaatgcttatagctcaaaacagctccttggaatttaagctacacagactgtattttattagcttgttaatgggtggaaccacaaatcagcgagaggcattacaatatgctaaaaattttcagccatttgccctaaatcatcaaaaagacattcaggttttgatgggaagccttgtgtacctgagacaagggattgagaactcaccatatgttcacctacttgatgcaaaccagtgggctgatatctgtgacatctttacacgggatgcttgtgccctcctggggctctccgtggagtcccctctcagtgtcagtttctcagcaggttgtgtggcgctgccagctttaattaacatcaaagccgtgattgaacagaggcagtgtactggagtttggaaccagaaagatgaattacctattgaagtggaccttggtaaaaagtgctggtatcactctatatttgcctgccccattcttcgtcagcaaacaacagataacaatccacccatgaaattggtctgtggtcatattatatcaagagatgccctgaataaaatgtttaatggtagcaaattaaaatgtccctactgtccaatggaacaaagtccaggagatgccaaacagatatttttctgaagagataactttagtttgcaatttgtaagtgaaactgaatcgtgggtgcatttcagaagagaacgttccatataatgcagctaaccaaggactcctgtgtttctataagctaatgctccagaaactttgccaacctgttagtgtacacacactgaggggagtgctcccggtgaatattatcatagggctttattatattcttggtcttcatttctgatcaagtaaatacaccagcagttgtcattcaatgcaggtttttgtacttaattatatggtgatttttttactttttaagagcagaaacggaaattgacctccccgccatgtgtttaatattcctcctgcttttacttttgtcattttcttgataatcgtaagccttgagagtgtttgtgaaaaagttttatttcctgttatgtatacataattaaatgaaaattcttcagaaaaagtttgataaattgaattgtggttatgaaactaatttgcatttttatttgcttaagaaagaaagctgtgatagattccagatatgctttttgatgttttcctctgctccagctccaagaagtcagcacacctgcattttagctctgcatgcagccccagcaggctgcgtgtttaagaatttcattgtttaactggctggtgtgagaagtcttccgttagcatagagtggaaggagtactattgtttggttgggtttttgtttgtttgttttttgtttttgcttttattgccaagaggtgcttgttttaaaagtatgtttaataaaatgaaattctaaagttagaagtgttcttaagttgatatttactctcttggtcttggtagccctattatatcattgcagacacagtgttgtgcatgtgtgtattgtatatgtgcaccagcatcaaacattgtgtatctggaaggaaagcagcatgttccagttctaaaatgcagttaccagacccatcactttaaatccttaaagttagaagctagcaaattttctgtagtgcagaacgtttattgctgtttttgtgtttgaatagtataatgtttgatgcctctcttctgcaaagcgtatcatctcattgactgtgaatctgtatattattctgatggatacagataatgatcttttctcttgtgaggtatcttcatttatgcactgtccaaaaatagccatgtgtaagagtctttctgtatgacgaactacatggaaaagacttctgtggacataattctgaccgaaacccatgaagttacttcagtataagaagaacgttacacggaaatcaccaaatattttgcaactttatttcttctgacatggagtgaacatcaataggaatactttcaaagaaaatgaaaacacagaagcaaagagaaatgtggcacttcacattttaaactacagatggacttggtttgagggagggggaatcacagatttggtgctaagttaattagaaactggcagcgttttacagtagtacaccagcctggatgttttttctaaaatgtttacctgggagagctggggtttgtttgtgaggagaaagagtactgtggaaaacctctgcttgagtaccatgtggccaggcctatgtggatggctactccgtgctgtgcggcttcaccagcggttgggattggcccagcttggagtgcttgtgtggtccaacctcagtctggccccatagtgacttttgccccatgattctgcttcactgttggaatcctctttgaagttccccctctctttgctaaagcagtgaaggaagagaacagagacaaactctttggactgtgaaagagaaggtagagaattccaggcaacagtctgaccaagggtgtaaaccagtttattatatatatatttttcctttgaattaaaacctatgagtgactacaaaaaggattagactgagccgaataaaaaaaaaaaaaaaaaaaaaaaaaaaaaaaaaaaaa

SEQ ID NO: 44 - DNA, 2244 bp, Homo Sapiens
ctccccgccccgaccatggtagtgttcaatggccttcttaagatcaaaatctgcgaggccgtgagcttgaagcccacagcctggtcgctgcgccatgcggtgggaccccggccgcagactttccttctcgacccctacattgccctcaatgtggacgactcgcgcatcggccaaacggccaccaagcagaagaccaacagcccggcctggcacgacgagttcgtcaccgatgtgtgcaacggacgcaagatcgagctggctgtctttcacgatgcccccataggctacgacgacttcgtggccaactgcaccatccagtttgaggagctgctgcagaacgggagccgccacttcgaggactggattgatctggagccagaaggaagagtgtatgtgatcatcgatctctcagggtcgtcgggtgaagcccctaaagacaatgaagagcgtgtgttcagggaacgcatgcggccgaggaagcggcagggggccgtcaggcgcagggtccatcaggtcaacggccacaagttcatggccacctatcttcggcagcccacctactgctcccattgcagagacttcatctggggtgtcataggaaagcagggataccagtgtcaagtctgcacctgcgtggtccacaagcggtgccacgagctcataatcacaaagtgtgctgggttaaagaagcaggagacccccgaccaggtgggctcccagcggttcagcgtcaacatgccccacaagttcggtatccacaactacaaggtccctaccttctgcgatcactgtgggtccctgctctggggactcttgcggcagggtttgcagtgtaaagtctgcaaaatgaatgttcaccgtcgatgtgagaccaacgtggctcccaactgtggagtggatgccagaggaatcgccaaagtactggccgacctgggcgttaccccagacaaaatcaccaacagcggccagagaaggaaaaagctcattgctggtgccgagtccccgcagcctgcttctggaagctcaccatctgaggaagatcgatccaagtcagcacccacctccccttgtgaccaggaaataaaagaacttgagaacaacattcggaaagccttgtcatttgacaaccgaggagaggagcaccgggcagcatcgtctcctgatggccagctgatgagccccggtgagaatggcgaagtccggcaaggccaggccaagcgcctgggcctggatgagttcaacttcatcaaggtgttgggcaaaggcagctttggcaaggtcatgttggcagaactcaagggcaaagatgaagtatatgctgtgaaggtcttaaagaaggacgtcatccttcaggatgatgacgtggactgcacaatgacagagaagaggattttggctctggcacggaaacacccgtaccttacccaactctactgctgcttccagaccaaggaccgcctctttttcgtcatggaatatgtaaatggtggagacctcatgtttcagattcagcgctcccgaaaattcgacgagcctcgttcacggttctatgctgcagaggtcacatcggccctcatgttcctccatcagcatggagtcatctacagggatttgaaactggacaacatccttctggatgcagaaggtcactgcaagctggctgacttcgggatgtgcaaggaagggattctgaatggtgtgacgaccaccacgttctgtgggactcctgactacatagctcctgagatcctgcaggagttggagtatggcccctccgtggactggtgggccctgggggtgctgatgtacgagatgatggctggacagcctccctttgaggccgacaatgaggacgacctatttgagtccatcctccatgacgacgtgctgtacccagtctggctcagcaaggaggctgtcagcatcttgaaagctttcatgacgaagaatccccacaagcgcctgggctgtgtggcatcgcagaatggcgaggacgccatcaagcagcacccattcttcaaagagattgactgggtgctcctggagcagaagaagatcaagccacccttcaaaccacgcattaaaaccaaaagagacgtcaataattttgaccaagactttacccgggaagagccggtactcacccttgtggacgaagcaattgtaaagcagatcaaccaggaggaattcaaaggtttctcctactttggtgaagacctgatgccctgagagcccactgcagtt

SEQ ID NO: 45 - DNA, 816 bp, Homo Sapiens
gccaggatcatgtccaccaccacatgccaagtggtggcgttcctcctgtccatcctggggctggccggctgcatcgcggccaccgggatggacatgtggagcacccaggacctgtacgacaaccccgtcacctccgtgttccagtacgaagggctctggaggagctgcgtgaggcagagttcaggcttcaccgaatgcaggccctatttcaccatcctgggacttccagccatgctgcaggcagtgcgagccctgatgatcgtaggcatcgtcctgggtgccattggcctcctggtatccatctttgccctgaaatgcatccgcattggcagcatggaggactctgccaaagccaacatgacactgacctccgggatcatgttcattgtctcaggtctttgtgcaattgctggagtgtctgtgtttgccaacatgctggtgactaacttctggatgtccacagctaacatgtacaccggcatgggtgggatggtgcagactgttcagaccaggtacacatttggtgcggctctgttcgtgggctgggtcgctggaggcctcacactaattgggggtgtgatgatgtgcatcgcctgccggggcctggcaccagaagaaaccaactacaaagccgtttcttatcatgcctcaggccacagtgttgcctacaagcctggaggcttcaaggccagcactggctttgggtccaacaccaaaaacaagaagatatacgatggaggtgcccgcacagaggacgaggtacaatcttatccttccaagcacgactatgtgtaatgctctaagacctctcagcac

SEQ ID NO: 46 - DNA, 4008 bp, Homo Sapiens
aggcagtgattttggggcagagaattttgcaacacgtggtagtgaactgtgaggagtttgaggggtctgaagactgaaagagtcgaatggtttgttggcagggtgtcctggtggattggtttctgtaagttcagattctcataaatcgtgtgagcgtcgccgacacctctgagataaaagggcccctttcgactagcctctgctgaaaggacctagaagaatcccttaggatgaagctgagtcttaccaaggtagttaatggctgtcgcctaggaaaaataaaaaacctgggcaaaacaggggaccacaccatggatattccaggctgccttctgtataccaagactggctccgccccacacctcacccatcacacgctgcataatatccacggggttcctgccatggctcagcttacgctgtcatccctagcagaacatcatgaagtcttgacagaatataaagaaggagttggaaagtttataggcatgccagaatcactcttgtactgctccctgcacgatccagtcagcccctgcccggctggttatgtaacaaacaagtctgtgtctgtgtggagtgttgcaggacgagtggaaatgactgtttccaagttcatggcaattcagaaggcccttcagccagactggttccagtgcctctccgatggagaagtatcttgtaaggaagcaacttccataaaaagggtcagaaagtctgttgaccgatcacttcttttcttggataactgtctgcggctgcaggaagagtcagaggttcttcagaagagtgtgatcattggagtgattgaaggtggagatgtgatggaagagaggctgaggtcagcacgagagacagccaagcggcctgtgggtggcttccttctggatggttttcaaggaaatccaacaaccctggaggctagactacgcttgctgtcatcagtcactgcagagctgccggaggacaagccaaggctcatatctggtgttagtcggccagatgaggtgctcgagtgtattgaaagaggagtggacttatttgagagttttttcccttatcaagtaacagagcggggatgtgccctgactttcagttttgattaccagccgaatcctgaagagacactactacaacaaaatggaacacaagaagaaataaaatgtatggatcaaataaagaaaattgaaacaactggttgcaaccaagaaataacatcatttgaaattaatctgaaggaaaaaaagtaccaggaggactttaacccgctggtgagaggatgttcctgttactgctgtaagaatcacactcgggcatacatccaccatctgctggtgaccaatgagctgctggccggagtcctgcttatgatgcacaactttgaacactactttgggtttttccattacatccgggaagcactaaaaagtgacaaactggcacagttgaaagagctcatccacaggcaagcatcttgagatcttgcaaatacaagtctcactcttcacactgagcctgtaccactgttgtaacatgggaagacgtgaagaagaaataatctgagctttaattatttatatttggatataaggtctgcttaaataaagaatctttgtaccaaactgcccacatgagggtgaagagatttcctcaaaagacttaaatgacctggattgatcagagagaattgaactgtgacctttaagacttctagactaattcttttagttgatagagattcatttagtcaaagacaaaagctttaactgtgagggcacagccttgaagtgggagtgatgagattctgagggacccatgaattggattgaggcttgaggggaaatggtgtgagacgaatgggctctggacatatgcctgttgatttgagaagaaatctggctggtttgagggtttcctttagttcaccctcatactctcaggagactcttctggatacttttgtcttccaccctgccctggcagtgcagccaatcagaaatggctcttgtgacttaactgggcttggatatccctggaatgtggggcttgaacattgctcctgtgatgatcatctgtcccaggtcacactccttcatttgaccacatggcctatttgcaacttctttttagagccaatgtaattgcctgttaggagccagaagtttgcccagctgctttcttctggttgtacagatccattgtggtctgccttccaggctcattaatagtctaactacgtaataactgaagacctatctcttgtgaagattcattctcaatgtgttcacttggacagagccctgcctggcctaacgattagagggttagtctccatcctgctcagatatgactcctgggcaattcacttaacttctccatggctgcttcctgctgaataaatagggacaggcataatggataggaatgaatgaacttttaagatactgtctagctctaaaattggaagaacaaaaagttttagattagagtcatagccttaatagccctagttgtcatcctgggagacaggcaacagtagagatatttgagagcctaaagagaggtttggcctgtgggtttttaagtggttattgaattggtatcaggagatcctgaggctggtaggggaaggtaattctttctaagttacctctgtatttttcaagttttctataaggaatacacatacacccacatgcacacaccatagtttttatacaaacagcaataacaaaaccaaaaagatgcccctttttttgtagggataagaaatacatttgttttatacttctatgctatattttgctattcaaaatttagtgggcattacttaacattgtttctaattattttgtggctgctgtatgttttatgtgttgggagcccattgtattaggccgttcttggattgctataaagaaatacctgagactgggtaatttggttttttggttttttggggttttttttgagacggagccttgctctgtcgcccaggctggagtgcagtggcgcgatctcggctctatgcaacctccacctcctgggttcatgccattctcctgcctcagcctcccgtgtagctgggactacaggcgcccgccaccatgcctggctaattttttatatttttagtagagatggggtttcaccgtatgagccaggatggtctcgatctcctgacctcatgatccacaagactgggtaatctgtaaagaaaagaggtttaattggctcatggctctgcaggctttacaggaagcatggtactggcatctgcttggtttctggggaggcctccggaagcttatagtcatgacagaaggtgaagggggagcaggcacatcacatgacaaaagcaggaacaagactcagagcaagaagtcacttatcaccaaggggatggcccaggccattcatgagggatccacctttgtgctccaaacacctcccaccaggccccacctccagtattggggattacatttcaacttgaggtttgggcgggaacaaatagtcaaattatattacccatctacatggttttctttttcttagtatgggagtgtccatgaataaattcatgggcatcctcataactcttccatgaatggcaaggggtacttatggaaaacagttttccaaagatctgattgttttgaaatgtgttagattggacttgttcaaatgttcatatttttgttctatgctaaatgcatcgttaggggagtagtggtaaatattccagaatccatatgaaattcatgagtttatttatgtctaaaacactgaaaactgtgtccaatatcgttcagtttcctgggtctttttcttattagcacatttgagaaaaatattcctttcctttattgtagtaaatctattaaaggcaatagccaataaaacatttttaattttaaaaatttactgtgtttggctttctgtaaatgtagtaggtctgttaaacaaaatattaaatttccatagtaccagaaaaaaaaaaaaaaa

SEQ ID NO: 47 - DNA, 275 bp, Homo Sapiens
  misc_feature (2)..(2): n is a, c, g, or t
  misc_feature (8)..(8): n is a, c, g, or t
  misc_feature (14)..(14): n is a, c, g, or t
  misc_feature (19)..(19): n is a, c, g, or t
  misc_feature (31)..(31): n is a, c, g, or t
  misc_feature (33)..(34): n is a, c, g, or t
  misc_feature (47)..(47): n is a, c, g, or t
  misc_feature (56)..(56): n is a, c, g, or t
  misc_feature (58)..(58): n is a, c, g, or t
  misc_feature (60)..(60): n is a, c, g, or t
  misc_feature (65)..(65): n is a, c, g, or t
  misc_feature (72)..(72): n is a, c, g, or t
  misc_feature (74)..(74): n is a, c, g, or t
  misc_feature (88)..(88): n is a, c, g, or t
  misc_feature (91)..(91): n is a, c, g, or t
  misc_feature (102)..(102): n is a, c, g, or t
  misc_feature (106)..(106): n is a, c, g, or t
  misc_feature (113)..(113): n is a, c, g, or t
  misc_feature (124)..(124): n is a, c, g, or t
  misc_feature (142)..(142): n is a, c, g, or t
  misc_feature (146)..(146): n is a, c, g, or t
  misc_feature (160)..(160): n is a, c, g, or t
  misc_feature (180)..(180): n is a, c, g, or t
  misc_feature (189)..(189): n is a, c, g, or t
  misc_feature (192)..(192): n is a, c, g, or t
  misc_feature (205)..(205): n is a, c, g, or t
  misc_feature (210)..(210): n is a, c, g, or t
  misc_feature (212)..(212): n is a, c, g, or t
  misc_feature (218)..(218): n is a, c, g, or t
  misc_feature (222)..(222): n is a, c, g, or t
  misc_feature (225)..(225): n is a, c, g, or t
  misc_feature (235)..(237): n is a, c, g, or t
  misc_feature (245)..(245): n is a, c, g, or t
  misc_feature (251)..(251): n is a, c, g, or t
  misc_feature (257)..(258): n is a, c, g, or t
  misc_feature (262)..(262): n is a, c, g, or t
  misc_feature (272)..(273): n is a, c, g, or t
gncatttnaaacangcaangaaagccacaancnncctcaaggtagcnctgcctaangntntaacnaagcaantnctaacctccgaaangcnctttccggggncgangcaatgnctgggggcttnaaagccgggagagaaatnttcncgtcgattaccaanggcaaggttttcggaaacgncgcaagccncanaaaaacctccggnggtgntncattcncggnggnaacgggcaannntaaggttntgcggnggcccnngggnccaacggttnnag

SEQ ID NO: 48 - DNA, 6734 bp, Homo Sapiens
cccagttgtctgcgggctgcggggagctaagtccccagattggaggaggctggctctggtcttcgatgcacaggagtggccgttatggaacgcagcagcagcgtgcagggtcaaagacagccggccccccatgtcagtggtctaggatggccagtgaaggcaccaacatcccaagtcctgtggtgcgccagattgacaagcagtttctgatttgcagtatatgcctggaacggtacaagaatcccaaggttctcccctgtctgcacactttctgcgagaggtgcctgcagaactacattcctgcccacagtttaaccctctcctgcccagtgtgccgccagacctccatcctgcccgagaaaggggtggccgcgctccagaacaatttcttcatcacaaacctgatggacgtgctgcagcgaactccaggcagcaacgctgaggagtcttccatcctggagacagtcactgctgtggctgcgggaaagcctctctcttgcccaaaccacgatgggaatgtgatggaattttactgccagtcctgtgagactgccatgtgtcgggagtgcacggagggggagcacgcagagcaccccacagttccactcaaggatgtggtggaacagcacaaggcctcgctccaggtccagctggatgctgtcaacaaaaggctcccagaaatagattctgctcttcagttcatctctgaaatcattcatcagttaaccaaccaaaaggccagcatcgtggatgacattcattccacctttgatgagctccagaagactttaaatgtgcgcaagagtgtgctgcttatggaattggaggtcaactatggcctcaaacacaaagtcctccagtcgcagctggatactctgctccaggggcaggagagcattaagagctgcagcaacttcacagcgcaggccctcaaccatggcacggagaccgaggtcctactggtgaagaagcagatgagcgagaagctgaacgagctggccgaccaggacttccccttgcacccgcgggagaacgaccagctggatttcatcgtggaaaccgaggggctgaagaagtccatccacaacctcgggacgatcttaaccaccaacgccgttgcctcagagacagtggccacgggcgaggggctgcggcagaccatcatcgggcagcccatgtccgtcaccatcaccaccaaggacaaagacggtgagctgtgcaaaaccggcaacgcctacctcaccgccgaactgagcacccccgacgggagcgtggcagacggggagatcctggacaacaagaacggcacctatgagtttttgtacactgtccagaaggaaggggactttaccctgtctctgagactctatgaccagcacatccgaggcagcccgtttaagctgaaagtgatccgatccgctgatgtgtctcccaccacagaaggcgtgaagaggcgcgttaagtccccggggagcggccacgtcaagcagaaagctgtgaaaagacccgcaagcatgtacagcactggaaaacgaaaagagaatcccatcgaagacgatttgatctttcgagtgggtaccaaaggaagaaataaaggagagtttacaaatcttcagggggtagctgcatctacaaatggaaagatattaattgcagacagtaacaaccaatgtgtgcagatattttccaatgatggccagttcaaaagtcgttttggcatacggggacgctctccggggcagctgcagcggcccacaggagtggctgtacatcccagtggggacataatcattgccgattatgataataaatgggtcagcattttctcctccgatgggaaatttaagacaaaaattggatcaggaaagctgatgggacccaaaggagtttctgtggaccgcaatgggcacattattgttgtggacaacaaggcgtgctgcgtgtttatcttccagccaaacgggaaaatagtcaccaggtttggtagccgaggaaatggggacaggcagtttgcaggtccccattttgcagctgtaaatagcaataatgagattattattacagatttccataatcattctgtcaaggtgtttaatcaggaaggagaattcatgttgaagtttggctcaaatggagaaggaaatgggcagtttaatgctccaacaggtgtagcagtggattcaaatggaaacatcattgtggccgactggggaaacagcaggatccaggtttttgatgggagtggatcatttttgtcctacattaacacatctgctgacccactctatggcccccaaggcctggccctaacttcagatggtcatgttgtggttgcagactctggaaatcactgtttcaaagtctatcgatacttacagtaatggtgggcaggtggatacccgcttccatggtcttgcactataaactggaatggatttctcaatgcgggaccagattatgactagagtttttatgccagaaggaatcattggtgaactttccaaggttatttctgaatgtaacaatttccttaaaaatgacttatccaatttctgtatttcacctttagggttaaaaaaaactcttctactgaatctataaaaactgcagttttacatctgtgaactatggcttaagggacaggatttatgtagctaaactaattttgcaaatcaaacagacacttaaaaaaactagcatatgtaaaggtattcgttaatcctgtgaatggtagcttttgcacagaacttccaaaagcaaaacaaaaacaaaatctattgtagttatatacttcatttaacctaggtcacaagacccagggaatcttctaacctcacttttacagtaggtattactcttgtgacatttttttggttatcaacaactaaatataaattactttggaaaaagtaaggctgtcttgcaaaatgatcccagctctgattagcagccctctggagttcagaacttaagtatcagtgcaaatttctcaacctttctgggttagacaaagatccttttttgtgtgttcttttcaccacccctttggctcaccttgtatcagcaaacaaagtacttcttcagggaaacctgaaatttctaatgccttgaaaagcatattacaaaagtaatgctaccttttgggaaacaaactgccccgttaactccagatcattgcactggaatgtaatcaagaaagttagtcatgttttatgtaccatgttttcacacgtgtctcttctcttcgacttcctgaaagcgaaagctttacctcctgcaaatgtcagcacatgtagtaggacaccagtatcctaggacagagagccataagtagccctttggaggactgatggtgtcaaccaaaggcatgtgattgattaatgattcccccttagaaagcaagtgttaccaaagttgtgttatcttgaaagcattacaggtaagggcatgttatggttatttatcattgtttaatgaatagtagaggtgtcaagggactatgtatacatgattagggtaagatagaatgtattatatatatatatatatatacacacacacatatatatagctgaatctttggtgtattgaaataggcagcactctgaaagacagaagcttcgtccagccactcttcagcacattcctttactaagcagtttaaagccgtcctagtggagcaagccctaaagcagatttaatttttgccattttccaagaatgacggtggtggcttttagtcagaaaatggccttctgtgctttcaaaaaaaaaacaaaaaaaaaaccacacacacacataaaaaacccaacaggtcaaaataaaagttgaacttgagttacatttaatttaaatataaatgcattttgagaaatgttaagaacaatttagtcaatcgttcatctgtcattggtactgtaaaataagctgtggtctatttccactgtttaattttctactcagttctaccaaataggatgtcatgtttgacatttttgatagtgactttggggtcttcttcactgaaagcaccttagaactgtactataagaaaacatttcccctatgtataattatatgaatgtgatgtttattgcttattaatttataattcagtcattctctatataggacttcttaaaatttagaagggaaatctagctacttcaaattgtctgttaaatttattatgcccaaatcaacctctgaaaaaaggtttttccaggaagatttacatttaggtttaatatttttttagttaggtagagttttaaaaaatacttgagcctgtccgtgataaagctataaaattcaataactttttagaatgttaaatgaagacactgtttcctaacatcagtgagatacatctttgaatttaaacattcatatttactgagtacctactaggtaccaagtactcttttaggcactggaaatacagtgatggacaaaacaggtaaaaaatcgctgccccctcagagctgacattctggggtgggaatttcattttgccacgtactaacgttctgcacaaaagacaggctagactcttgtctagattgtttaaaagaaacttttcaaattggttacattaattttagtttattttcacaagtaaaaatggctttttatttagattctttctgtcccaggctgttgatcttaaaactagttgatttaaagagtttttttgcacaacatttcaattatatttgtgaacttagaaattaacttacaatctaaccagccatcatatcatatcctatcaggctagatatctcaatagtagactgaatacaaagctaattttttttacatgtcaatattggcacaaactggaatgaaagaatagtttgattcagacctgctccactatgtgttgctaaaacacatgctatgagcactcgaggaaacactatattttttccaaaaaatatgtgattatatatgttaaagtatagataacatttcacacttggatacatatgtgcatttactgtatttcttggtaagcatatttttgggggaaagtgctgctgatatgatacaagtagacaaaatttaaatgaaattttgtcacattctatggaaaatggtttctggtaaactgagaaggatattaaaataagtggcttttttctgggctaccattattgtttgatttctctttgtcaagtgtatagaacctgtcatacattcatgataagtagcactgaaaaattactcattcaaatttcccctgggcacgtaaggcaaaatattgccggttgggatttcaaggtcagtgacgacgcatttcctcccagtacagaccccccagccccccttgctggacatggggaggcagagagtcacttgaccatccagaaatacatgactacaagtcctttatgactgtttgccattttttttaatggtacttagtattttgatcaaactttagtctccagaactaaacaagtccctaagtttccttattttaatttactgtgactagatttgaagcaaataaatactccagatccatgcagctagaacacacttgcttccactactaaatatacagggtatgtcctaacatggagttaactggaatagcagtacactagcaagtatctgtgaatccttagcactgacgggttaacagaaatgctttggtaatacctacttagttaattggaggaagtagtaaataaacattaggtaatctgcagattacttcaaatgggaaaaatctttttgtagactctatagtaccctctctattcactagcttctgaaaagggaggagtatttttagtttgacaatttaataatttaaaaacaagacatctccaggtaggaaaaaatgaaagctatttcatgcaaacattatctaatttagcttaaaagtgaaagtggtaatactgttggtttctgtaaatgttgcagggttttaaactttataattactttaatatttttgataactagaaatctagtattgccataaaggaaactaagtgcccatcaaagatttgtttggtataaataaagaattatttgttttgttttcaatgacagtaagctacaaatcatgatgcttaaaaactttctaaagatgaattgtgtggcagtgattggtctgtttgtggagaatgtatgaaagctattaatattctagaatagattaataaattggctatgttgttccaatgaatgtacagcacttccattaacttttgaaagcaacacagccttaaactcaatgcttttgctttatgacatgggaatgttctgtcatcaatggagtgtattcttgtaatagaattctttatatcgttctcaattctatagactttcaagcctatgtatgaatatgaaggggtttttttttttttgctttgttttctttttagattttgtacattccatctttataggtctgtttcatatgttttatgtatagaacactaagtcttgcactctctgacattgatactgatatattctcgtcatttgttcttttatgaatcaaaatgttgactgcctatttaaagaaaagaatgaacgctgtgcatcaaagtgtttgtatgttcgtagctacatacgtaccacagtattttggatgctttagtctacaatgaaactttcaattaattctgtcttgaaacataggagaaacaggattcatgtgtatctctttaccatgcacaaaatctcaaatcattataataaagcttgttttctcc

SEQ ID NO: 49 - DNA, 1814 bp, Homo Sapiens
  misc_feature (1562)..(1562): n is a, c, g, or t
atgcggcattccaaaagaactcactgtcctgattgggatagcagagaaagctggggacatgaaagctatcgtggaagtcacaagcggaagaggagatctcatagtagcacacaagagaacaggcattgtaaaccacatcaccagtttaaagaatctgattgtcattatttagaagcaaggtccttgaatgagcgagattatcgggaccggagatacgttgacgaatacaggaatgactactgtgaaggatatgttcctagacattatcacagagacattgaaagcgggtatcgaatccactgcagtaaatcttcagtccgcagcaggagaagcagtcctaaaaggaagcgcaatagacactgttcaagtcatcagtcacgttcgaagagccaccgaaggaaaagatccaggagtatagaggatgatgaggagggtcacctgatctgtcaaagtggagacgttctaagagcaagatatgaaatcgtggacactttgggtgaaggagcctttggcaaagttgtagagtgcattgatcatggcatggatggcatgcatgtagcagtgaaaatcgtaaaaaatgtaggccgttaccgtgaagcagctcgttcagaaatccaagtattagagcacttaaatagtactgatcccaatagtgtcttccgatgtgtccagatgctagaatggtttgatcatcatggtcatgtttgtattgtgtttgaactactgggacttagtacttacgatttcattaaagaaaacagctttctgccatttcaaattgaccacatcaggcagatggcgtatcagatctgccagtcaataaattttttacatcataataaattaacccatacagatctgaagcctgaaaatattttgtttgtgaagtctgactatgtagtcaaatataattctaaaatgaaacgtgatgaacgcacactgaaaaacacagatatcaaagttgttgactttggaagtgcaacgtatgatgatgaacatcacagtactttggtgtctacccggcactacagagctcccgaggtcattttggctttaggttggtctcagccttgtgatgtttggagcataggttgcattcttattgaatattaccttggtttcacagtctttcagactcatgatagtaaagagcacctggcaatgatggaacgaatattaggacccataccacaacacatgattcagaaaacaagaaaacgcaagtattttcaccataaccagctagattgggatgaacacagttctgctggtagatatgttaggagacgctgcaaaccgttgaaggaatttatgctttgtcatgatgaagaacatgagaaactgtttgacctggttcgaagaatgttagaatatgatccaactcaaagaattaccttggatgaagcattgcagcatcctttctttgacttattaaaaaagaaatgaaatgggaatcagtggtcttactatatacttctctagaagagattacttaagactgtgtcagtcaactaaacattctaatatttttgtaaacattaaattattttgtacagttaagngtaaatattgtatgttttgtatcaatagcataattaacttgttaagcaagtatggtcttgataatgcattagaaaaattaaaattaatttttctttttgaaattaccatttttaaaaacctttgaaatatcctttgtgtccagtgataaatgtgattgatcttgccttttgtacatggaggtcacctctgaagtgattttttttgagtaaaaggaaatcttgactactttaaaaaaaaaaaaaaaaaaaaaa

SEQ ID NO: 50 - DNA, 2733 bp, Homo Sapiens
gctttctaaggcggtcgctccgggaaatccgggccctaggattgtccactcatcccagtatcagcgagatacggggagatagagttagcgacaacgtgagccagagctggagcacgtttggtgagagaccagaaagcaatggaggccggagaggggaaggagcgcgttccgaaacaaaggcaagtcctgatattctttgttttgctgggcatagctcaggctagttgccagcctaggcactattcagtggccgaggaaacggagagtggctcctttgtggccaatttgttaaaagacctggggctggagataggagaacttgctgtgaggggggccagggtcgtttccaaaggaaaaaaaatgcatttgcagttcgataggcagaccggggatttgttgttaaatgagaaattggaccgggaggagctgtgcggccccacagagccctgtgtcctacctttccaggtgttactagaaaatcccttgcagttttttcaggcggagctacggattagggacgtaaatgatcattccccagttttcctagacaaagaaatacttttgaaaattccagaaagtatcactcctggaactactttcttaatagaacgtgcccaggacttggatgtaggaaccaacagtctccaaaattacacaatcagtcccaatttccactttcatcttaatttacaagacagtctcgatggcataatattaccacagctggtgctgaacagagccctggatcgcgaggagcagcctgagatcaggttaaccctcacagcgctagatggcgggagtccacccaggtccggcacggccctggtacggattgaagttgtggacatcaatgacaacgtcccagagtttgcaaagctgctctatgaggtgcagatcccggaggacagccccgttggatcccaggttgccatcgtctctgccagggatttagacattggaactaatggagaaatatcttatgcattttcccaagcatctgaagacattcgcaaaacgtttcgattaagtgcaaaatcgggagaactgcttttaagacagaaactggatttcgaatccatccagacatacacagtaaatattcaggcgacagatggtgggggcctatctggaacttgtgtggtatttgtccaagtgatggatttgaatgacaatcctccggaactaactatgtcgacacttatcaatcagatcccagaaaacttgcaggacaccctcattgctgtattcagcgtttcagatcctgactccggagacaacggaaggatggtgtgctccatccaagatgatcttccttttttcttgaaaccttctgttgagaacttttacactctggtgataagcacggccctggaccgggagaccagatccgaatacaacatcaccatcaccgtcaccgacttcgggacacccaggctgaaaaccgagcacaacataaccgtgctggtctccgacgtcaatgacaacgcccccgccttcacccaaacctcctacaccctgttcgtccgcgagaacaacagccccgccctgcacatcggcagcgtcagcgccacagacagagactcgggcaccaacgcccaggtcacctactcgctgctgccgccccaggacccgcacctgcccctcgcctccctggtctccatcaacgcggacaacggccacctgttcgctctccagtcgctggactacgaggccctgcaggcgttcgagttccgcgtgggcgccgcagaccgcggctccccggcgttgagcagcgaggcgctggtgcgcgtgctggtgctggacgccaacgacaactcgcccttcgtgctgtacccgctgcagaacggctccgcgccctgcaccgagctggtgccccgggcggccgagccgggctacctggtgaccaaggtggtggcggtggacggcgactcgggccagaacgcctggctgtcgtaccagctgctcaaggccacggagcccgggctgttcggcgtgtgggcgcacaatggcgaggtgcgcaccgccaggctgctgagggagcgcgacgctgccaagcagaggctggtggtgctggtcaaggacaatggcgagcctccgcgctcggccaccgccacgctgcacgtgctcctggtggacggcttctcccagccctacctgctgctcccggaggcggcaccggcccaggcccaggccgacttgctcaccgtctacctggtggtggcgttggcctcggtgtcttcgctcttcctcttctcggtgctcctgttcgtggcggtgcggctgtgcaggaggagcagggcggcctcggtgggtcgctgctcggtgcccgagggcccctttccagggcagatggtggacgtgagcggcaccgggaccctgtcccagagctaccagtacgaggtgtgtctgactggaggctccgggacaaatgagttcaagttcctgaagccaattatccccaacttcgttgctcagggtgcagagagggttagcgaggcaaatcccagtttcaggaagagctttgaattcacttaagtgttaataaggatctactgaggctagtctcgtttaatttgtggaaagtccttttttactgctttgcccattggaggtgtctccttttattagaaagtaaccatcttattccaattctatgcatgttactggtatttataaatgtatgagtttttttgcggtataataaatgtaaattttctttgtattctaaaaaaa

SEQ ID NO: 51 - DNA, 1290 bp, Homo Sapiens
gttacaatctgaagtgggagcggcggtgaaggtcctgggtgaggtaggggtggatggtgcttgccgcgtatcatggctgcctccggaaaactcagcacttgccgtctccctccgttgcccacgattcgagaaatcattaagttgttaagactgcaagcagcgaacgagctatcacagaatttcctcctggacttgaggctgacagataagattgtaaggaaagctggcaatctgacaaatgcttatgtttacgaagtgggccctgggccagggggaatcacaagatctattcttaatgccgacgtcgctgaacttctggtggttgaaaaggacactcgatttattcctggattacagatgctttctgatgcagcacctgggaaactgagaattgttcatggagatgtcttgacatttaaggtagaaaaggctttttcagaaagtcttaaaagaccctgggaagatgatcctccaaatgtacatattattggaaatctgccttttagtgtttcaactccactgattatcaagtggcttgaaaatatttcctgtagagatggaccttttgtttatggcagaactcagatgactttgacttttcaaaaggaagtggcagagagacttgcagccaatacaggaagcaaacagcgtagtcgcctctctgttatggctcagtacctctgcaatgttcgacacatctttacaattccaggacaagcttttgtccccaaaccagaggtggacgtgggcgtggtgcacttcactcccttgatacagcccaagatagagcagccattcaagctggtggaaaaagtggttcagaatgtatttcagttccgaaggaaatactgccatcgagggctcagaatgttattccctgaagcgcagcgcttggaaagcacgggcaggctgttagagttggcagacatagaccctactcttcggccccgccagctctccatctcacactttaagagcctctgtgatgtatacagaaaaatgtgtgatgaagacccacaactctttgcatataatttcagagaagaactcaagcgaagaaaaagcaaaaatgaagaaaaagaagaggatgacgcagagaattacagactctagctgctgcctgggggcgagcagcctaccagatgtcgatttgcctacgtggagcttcttatataggtactcttttgtctttacagaatgacgatacaaatgccaatgaccagatgtgacttattttccttttactatacagcttggcagagaaaataaatatcatcaaataagaaaaaa

SEQ ID NO: 52 - DNA, 139 bp, Homo Sapiens
ctctggatggatttccaactgtaggatgtgcggccacgaagtacccatagccacccaggctgcaaagaagatggaggtggataaatggggcagccacatggctaacagacaaggtagggacagaggcggtactcggggg

SEQ ID NO: 53 - DNA, 7368 bp, Homo Sapiens
caagctttcaagcattcaaaggtctaaatgaaaaaggctaagtattatttcaaaaggcaagtatatcctaatatagcaaaacaaacaaagcaaaatccatcagctactcctccaattgaagtgatgaagcccaaataattcatatagcaaaatggagaaaattagaccggccatctaaaaatctgccattggtgaagtgatgaagaacatttactgtcttattccgaagcttgtcaattttgcaactcttggctgcctatggatttctgtggtgcagtgtacagttttaaatagctgcctaaagtcgtgtgtaactaatctgggccagcagcttgaccttggcacaccacataatctgagtgaaccgtgtatccaaggatgtcacttttggaactctgtagatcagaaaaactgtgctttaaagtgtcgggagtcgtgtgaggttggctgtagcagcgcggaaggtgcatatgaagaggaagtactggaaaatgcagacctaccaactgctccctttgcttcttccattggaagccacaatatgacattacgatggaaatctgcaaacttctctggagtaaaatacatcattcagtggaaatatgcacaacttctgggaagctggacttatactaagactgtgtccagaccgtcctatgtggtcaagcccctgcaccccttcactgagtacattttccgagtggtttggatcttcacagcgcagctgcagctctactcccctccaagtcccagttacaggactcatcctcatggagttcctgaaactgcacctttgattaggaatattgagagctcaagtcccgacactgtggaagtcagctgggatccacctcaattcccaggtggacctattttgggttataacttaaggctgatcagcaaaaatcaaaaattagatgcagggacacagagaaccagtttccagttttactccactttaccaaatactatctacaggttttctattgcagcagtaaatgaagttggtgagggtccagaagcagaatctagtattaccacttcatcttcagcagttcaacaagaggaacagtggctctttttatccagaaaaacttctctaagaaagagatctttaaaacatttagtagatgaagcacattgccttcggttggatgctatataccataatattacaggaatatctgttgatgtccaccagcaaattgtttatttctctgaaggaactctcatatgggcgaagaaggctgccaacatgtctgatgtatctgacctgagaattttttacagaggttcaggattaatttcttctatctccatagattggctttatcaaagaatgtatttcatcatggatgaactggtatgtgtctgtgatttagagaactgctcaaacatcgaggaaattactccaccctctattagtgcacctcaaaaaattgtggctgattcatacaatgggtatgtcttttacctcctgagagatggcatttatagagcagaccttcctgtaccatctggccggtgtgcagaagctgtgcgtattgtggagagttgcacgttaaaggactttgcaatcaagccacaagccaagcgaatcatttacttcaatgacactgcccaagtcttcatgtcaacatttctggatggctctgcttcccatctcatcctacctcgcatcccctttgctgatgtgaaaagttttgcttgtgaaaacaatgactttcttgtcacagatggcaaggtcattttccaacaggatgctttgtcttttaatgaattcatcgtgggatgtgacctgagtcacatagaagaatttgggtttggtaacttggtcatctttggctcatcctcccagctgcaccctctgccaggccgcccgcaggagctttcggtgctgtttggctctcaccaggctcttgttcaatggaagcctcctgcccttgccataggagccaatgtcatcctgatcagtgatattattgaactctttgaattaggcccttctgcctggcagaactggacctatgaggtgaaagtatccacccaagaccctcctgaagtcactcatattttcttgaacataagtggaaccatgctgaatgtacctgagctgcagagtgctatgaaatacaaggtttctgtgagagcaagttctccaaagaggccaggcccctggtcagagccctcagtgggtactaccctggtgccagctagtgaaccaccatttatcatggctgtgaaagaagatgggctttggagtaaaccattaaatagctttggcccaggagagttcttatcctctgatataggaaatgtgtcagacatggattggtataacaacagcctctactacagtgacacgaaaggcgacgtttttgtgtggctgctgaatgggacggatatctcagagaattatcacctacccagcattgcaggagcaggggctttagcttttgagtggctgggtcactttctctactgggctggaaagacatatgtgatacaaaggcagtctgtgttgacgggacacacagacattgttacccacgtgaagctattggtgaatgacatggtggtggattcagttggtggatatctctactggaccacactctattcagtggaaagcaccagactaaatggggaaagttcccttgtactacagacacagccttggttttctgggaaaaaggtaattgctctaactttagacctcagtgatgggctcctgtattggttggttcaagacagtcaatgtattcacctgtacacagctgttcttcggggacagagcactggggataccaccatcacagaatttgcagcctggagtacttctgaaatttcccagaatgcactgatgtactatagtggtcggctgttctggatcaatggctttaggattatcacaactcaagaaataggtcagaaaaccagtgtctctgttttggaaccagccagatttaatcagttcacaattattcagacatcccttaagcccctgccagggaacttttcctttacccctaaggttattccagattctgttcaagagtcttcatttaggattgaaggaaatgcttcaagttttcaaatcctgtggaatggtccccctgcggtagactggggtgtagttttctacagtgtagaatttagtgctcattctaagttcttggctagtgaacaacactctttacctgtatttactgtggaaggactggaaccttatgccttatttaatctttctgtcactccttatacctactggggaaagggccccaaaacatctctgtcacttcgagcacctgaaacagttccatcagcaccagagaaccccagaatatttatattaccaagtggaaaatgctgcaacaagaatgaagttgtggtggaatttaggtggaacaaacctaagcatgaaaatggggtgttaacaaaatttgaaattttctacaatatatccaatcaaagtattacaaacaaaacatgtgaagactggattgctgtcaatgtcactccctcagtgatgtcttttcaacttgaaggcatgagtcccagatgctttattgccttccaggttagggcctttacatctaaggggccaggaccatatgctgacgttgtaaagtctacaacatcagaaatcaacccatttcctcacctcataactcttcttggtaacaagatagtttttttagatatggatcaaaatcaagttgtgtggacgttttcagcagaaagagttatcagtgccgtttgctacacagctgataatgagatgggatattatgctgaaggggactcactctttcttctgcacttgcacaatcgctctagctctgagcttttccaagattcactggtttttgatatcacagttattacaattgactggatttcaaggcacctctactttgcactgaaagaatcacaaaatggaatgcaagtatttgatgttgatcttgaacacaaggtgaaatatcccagagaggtgaagattcacaataggaattcaacaataatttctttttctgtatatcctcttttaagtcgcttgtattggacagaagtttccaattttggctaccagatgttctactacagtattatcagtcacaccttgcaccgaattctgcaacccacagctacaaaccaacaaaacaaaaggaatcaatgttcttgtaatgtgactgaatttgagttaagtggagcaatggctattgatacctctaacctagagaaaccattgatatactttgccaaagcacaagagatctgggcaatggatctggaaggctgtcagtgttggagagttatcacagtacctgctatgctcgcaggaaaaacccttgttagcttaactgtggatggagatcttatatactggatcatcacagcaaaggacagcacacagatttatcaggcaaagaaaggaaatggggccatcgtttcccaggtgaaggccctaaggagtaggcatatcttggcttacagttcagttatgcagccttttccagataaagcgtttctgtctctagcttcagacactgtggaaccaactatacttaatgccactaacactagcctcacaatcagattacctctggccaagacaaacctcacatggtatggcatcaccagccctactccaacatacctggtttattatgcagaagttaatgacaggaaaaacagctctgacttgaaatatagaattctggaatttcaggacagtatagctcttattgaagatttacaaccattttcaacatacatgatacagatagctgtaaaaaattattattcagatcctttggaacatttaccaccaggaaaagagatttggggaaaaactaaaaatggagtaccagaggcagtgcagctcattaatacaactgtgcggtcagacaccagcctcattatatcttggagagaatctcacaagccaaatggacctaaagaatcagtccgttatcagttggcaatctcacacctggccctaattcctgaaactcctctaagacaaagtgaatttccaaatggaaggctcactctccttgttactagactgtctggtggaaatatttatgtgttaaaggttcttgcctgccactctgaggaaatgtggtgtacagagagtcatcctgtcactgtggaaatgtttaacacaccagagaaaccttattccttggttccagagaacactagtttgcaatttaattggaaggctccattgaatgttaacctcatcagattttgggttgagctacagaagtggaaatacaatgagttttaccatgttaaaacttcatgcagccaaggtcctgcttatgtctgtaatatcacaaatctacaaccttatacttcatataatgtcagagtagtggtggtttataagacgggagaaaatagcacctcacttccagaaagctttaagacaaaagctggagtcccaaataaaccaggcattcccaaattactagaagggagtaaaaattcaatacagtgggagaaagctgaagataatggatgtagaattacatactatatccttgagataagaaagagcacttcaaataatttacagaaccagaatttaaggtggaagatgacatttaatggatcctgcagtagtgtttgcacatggaagtccaaaaacctgaaaggaatatttcagttcagagtagtagctgcaaataatctagggtttggtgaatatagtggaatcagtgagaatattatattagttggagatgatttttggataccagaaacaagtttcatacttactattatagttggaatatttctggttgttacaatcccactgacctttgtctggcatagaagattaaagaatcaaaaaagtgccaaggaaggggtgacagtgcttataaacgaagacaaagagttggctgagctgcgaggtctggcagccggagtaggcctggctaatgcctgctatgcaatacatactcttccaacccaagaggagattgaaaatcttcctgccttccctcgggaaaaactgactctgcgtctcttgctgggaagtggagcctttggagaagtgtatgaaggaacagcagtggacatcttaggagttggaagtggagaaatcaaagtagcagtgaagactttgaagaagggttccacagaccaggagaagattgaattcctgaaggaggcacatctgatgagcaaatttaatcatcccaacattctgaagcagcttggagtttgtctgctgaatgaaccccaatacattatcctggaactgatggagggaggagaccttcttacttatttgcgtaaagcccggatggcaacgttttatggtcctttactcaccttggttgaccttgtagacctgtgtgtagatatttcaaaaggctgtgtctacttggaacggatgcatttcattcacagggatctggcagctagaaattgccttgtttccgtgaaagactataccagtccacggatagtgaagattggagactttggactcgccagagacatctataaaaatgattactatagaaagagaggggaaggcctgctcccagttcggtggatggctccagaaagtttgatggatggaatcttcactactcaatctgatgtatggtcttttggaattctgatttgggagattttaactcttggtcatcagccttatccagctcattccaaccttgatgtgttaaactatgtgcaaacaggagggagactggagccaccaagaaattgtcctgatgatctgtggaatttaatgacccagtgctgggctcaagaacccgaccaaagacctacttttcatagaattcaggaccaacttcagttattcagaaattttttcttaaatagcatttataagtccagagatgaagcaaacaacagtggagtcataaatgaaagctttgaaggtgaagatggcgatgtgatttgtttgaattcagatgacattatgccagttgctttaatggaaacgaagaaccgagaagggttaaactatatggtacttgctacagaatgtggccaaggtgaagaaaagtctgagggtcctctaggctcccaggaatctgaatcttgtggtctgaggaaagaagagaaggaaccacatgcagacaaagatttctgccaagaaaaacaagtggcttactgcccttctggcaagcctgaaggcctgaactatgcctgtctcactcacagtggatatggagatgggtctgattaatagcgttgtttgggaaatagagagttgagataaacactctcattcagtagttactgaaagaaaactctgctagaatgataaatgtcatggtggtctataactccaaataaacaatgcaacgttcc

SEQ ID NO: 54 - DNA, 1519 bp, Homo Sapiens
gagaagcgaggttctcgttctgagggacaggcttgagatcggctgaagagagcgggcccaggctctgtgaggaggcaagggaggtgagaaccttgctctcagagggtgactcaagtcaacacagggaacccctcttttctacagacacagtgggtcgcaggatctgacaagagtccaggttctcaggggacagggagagcaagaggtcaagagctgtgggacaccacagagcagcactgaaggagaagacctgcctgtgggtccccatcgcccaagtcctgcccacactcccacctgctaccctgatcagagtcatcatgcctcgagctccaaagcgtcagcgctgcatgcctgaagaagatcttcaatcccaaagtgagacacagggcctcgagggtgcacaggctcccctggctgtggaggaggatgcttcatcatccacttccaccagctcctcttttccatcctcttttccctcctcctcctcttcctcctcctcctcctgctatcctctaataccaagcaccccagaggaggtttctgctgatgatgagacaccaaatcctccccagagtgctcagatagcctgctcctccccctcggtcgttgcttcccttccattagatcaatctgatgagggctccagcagccaaaaggaggagagtccaagcaccctacaggtcctgccagacagtgagtctttacccagaagtgagatagatgaaaaggtgactgatttggtgcagtttctgctcttcaagtatcaaatgaaggagccgatcacaaaggcagaaatactggagagtgtcataaaaaattatgaagaccacttccctttgttgtttagtgaagcctccgagtgcatgctgctggtctttggcattgatgtaaaggaagtggatcccactggccactcctttgtccttgtcacctccctgggcctcacctatgatgggatgctgagtgatgtccagagcatgcccaagactggcattctcatacttatcctaagcataatcttcatagagggctactgcacccctgaggaggtcatctgggaagcactgaatatgatggggctgtatgatgggatggagcacctcatttatggggagcccaggaagctgctcacccaagattgggtgcaggaaaactacctggagtaccggcaggtgcctggcagtgatcctgcacggtatgagtttctgtggggtccaagggctcatgctgaaattaggaagatgagtctcctgaaatttttggccaaggtaaatgggagtgatccaagatccttcccactgtggtatgaggaggctttgaaagatgaggaagagagagcccaggacagaattgccaccacagatgatactactgccatggccagtgcaagttctagcgctacaggtagcttctcctaccctgaataaagtaagacagattcttcactgtgttttaaaaggcaagtcaaataccacatgattttactcatatgtggaatctaaaaaaaaaaaaaaaaaaa

SEQ ID NO: 55 - DNA, 4357 bp, Homo Sapiens
atagtcaccagaagctggaagagtcaaaggacacattctcccctcaagccccagtgggagcacggcccagctggattttggacttctggcctccagaactagacagggcctcactgtgtcacccagggtggaatacagtggtgtgatcatagctcactgcagcctggaattcctgggctcaagcaaccctgccacctcagccttccaagtagctaggactacagaacatccatgatagcagtcttctgtaaatcgaacttttcaagaattctctgaaggaaccaagtaggatattcttacatcatgacttaatgtgaatgcaagaacaagaaataggttttatctctaaatataatgaagggctgtgtgtaaacactgaccctgtctcaattctaacaagcattttagacatgagtttacatcggcaaatgggttcagatcgagatcttcagtcctctgcttcatctgtgagcttgccttcagtcaaaaaggcacccaaaaaaagaagaatttcaataggctccctgtttcggaggaaaaaagataacaaacgtaaatcaagggagctaaatggcggggtggatggaattgcaagtattgaaagtatacattctgaaatgtgtactgataagaactccattttctctacaaatacctcttctgacaatggattaacttccatcagcaaacaaattggagacttcatagagtgccctttgtgccttttgcggcattctaaagacagatttcctgatataatgacttgtcatcacagatcttgtgtggattgcttacgacaatatttaaggatagaaatctctgaaagcagagttaatattagttgcccagaatgtactgaacggtttaatccccatgatattcgcttgatattaagtgatgatgtcttgatggaaaaatacgaagaatttatgcttagacggtggcttgttgcagatcctgattgtaggtggtgtccagctccagactgtggatatgctgtgatagcatttggatgtgccagctgtccaaaattaacttgtgggcgagagggctgtggaacagagttttgctaccactgtaaacagatttggcaccccaaccagacctgtgatgctgctcgacaagagagagcccagagcttacgtttgagaactatacgttcttcatccattagttatagtcaagagtctggagcagcagctgatgatataaagccatgtccacgatgtgctgcttatataataaagatgaatgatgggagctgcaatcacatgacatgtgctgtttgtggttgtgagttttgttggttgtgtatgaaagaaatctcagatttgcattatctaagtccatcaggatgtactttttgggggaagaaaccctggagccgaaagaagaaaatattgtggcaactgggaacactggttggtgctcctgtcggaatcgctttaatagctggcattgctattcctgcaatgattattggcattcctgtgtatgtgggccgcaagattcacaatcgctatgaaggcaaggatgtttcaaagcacaaacggaatttggccatagcaggtggtgtaacgttgtctgtaatcgtgtctccagtagtagctgcagtgactgtaggtatcggtgttcctattatgttagcttatgtctatggcgtagttccaatttctctttgtcgaagcggaggttgtggagtctcagcaggcaatggaaaaggagttaggattgaatttgatgatgaaaatgatataaatgttggtggaactaacacagctgtagacacaacatcagtagcagaagcaagacacaacccaagcataggggagggaagtgttggtgggctgactggcagtttgagtgcaagtggaagccacatggatcgaataggagccatccgagacaacctgagtgaaacggccagcaccatggcactagctggagccagtataacggggagtctgtcaggaagtgccatggtaaactgttttaacaggttggaagtacaagcagatgtacagaaagaacggtacagtctaagtggagaatctggcacagtcagcttgggaacagttagtgataatgccagcaccaaagcaatggcaggatccattctgaattcctacatcccattggacaaagaaggcaacagtatggaggtgcaagtagatattgagtcaaagccatccaaattcaggcacaacagtggaagcagtagtgtggatgatggcagtgccacccgaagtcatgctggcggttcatccagtggcttgcctgaaggtaaatctagtgccaccaagtggtccaaagaagcaacagcagggaaaaaatcaaaaagtggtaaactgaggaaaaagggtaacatgaagataaatgagacgagagaggacatggatgcacagttgttagaacaacaaagcacgaactcaagtgaatttgaggctccatccctcagtgacagtatgccttctgtagcagattctcactctagtcatttttctgaatttagttgttctgacctagaaagcatgaaaacttcttgtagtcatggttccagtgattatcacacccgctttgctactgttaacattcttcctgaggtagaaaatgaccgtctggaaaattccccacatcagtgtagcatttctgtggttacccaaactgcttcctgttcagaagtttcacagttgaatcatattgctgaagaacatggtaacaatggaataaaacctaatgttgatttatattttggcgatgcactaaaagaaacaaataacaaccactcacatcagacaatggaattaaaagttgcaattcagactgaaatttaggcccataaatgctgcagaataattaccactgtacaaccgtgtttggagctggttgaactacatgtgactacttaagtttcaggttaccagcaaaagccgggtttcattatcataatgcagatacattttctgtgttcagcaaggcattgtgtgtcatgtggatcttagttaccaaactatgaagtgaaggctttaaaagtgcattattttaaggataataaatttgaagagcaaagcatgttttgtgtgtttgccacaaaacattgcttgaagcacatacttagatagaaattggtcttaatttatataatcaatataaaatactaatgcaattctacagcattcaaatgaagaaaacttgaggctttagggataagtggttagtgatattttattgaaaccactaaagagataagtttaaaagaactgcataggttactctcagtatatgatactctgtaacatttctatttatatcggcataaatttcattttttttcttcatatgcaatgtggttatataaagcttaatgcagctcatttgctaccatttggatacttagacactttgagcaagattgtggcagtttttgcacaactttgaaatagaaatacctggtactctatcttgtttattgttgatgccatcttagaggaaaaaatgtaaaggtaagtaattaagcatatgacagcaacaaataagatacataaaactacaaaataaagtcccattaggttataagtattacaaaaaatccacctttctctaaggggaagtttgtaccccattgattcttggtgcctttgggatcgactgggttttaatggcctagttatttgaggattttgctgtgttgttttccatgtcttctctggtcaccttggattatatataaaaatacaggaaatagataaacatgaatgtgattaataatgctgaaaaagtattagcctaccaaagacacactcaggctttagtgaataactttacataacctcagtttttaacacatgcatatcttctccaaccatgaaatcaaagcacggtgcagaacttgtaccaagtacaaaaggtccatgtatgattagcattattttcttttgcttttgtttatggacaatgttcagctgacataagcagaagttggccaaaatactgcctgtactgttaatttcctgtataattcacttaaataaaagcaggttaacctcaatgatagcagttaaaatgttctatcttatgtatttcttttaagtattaccattatggtgctactgagcgttttcttttggtaaaaagaaaaatgccatgggctgcagtcttcttccatcacttttccctaccaggtccattaatatgcttataacactagtgccagttattttatttgataatgcttatggtatttgtatatttgtttgcattccaattttgtttaataatgagtgtgtaaactgcatacgttaaataaatgtaaatactaatgtactgctgcaaaaaaaaaaaaaaaaaaaaaaaaaaa

SEQ ID NO: 56 - DNA, 2880 bp, Homo Sapiens
attttttgctcagcccgcctgcgccgcttgggacgcctctgcctttccctccctcccttccccgacggcttctggcggccaagcggatgtggcgggtgatcgagccaccctgcccaggggcgcccagcactggttcagtgaacagcattttggacaggacatttggtgccaggtctgagtagccagtttgctgaattattgtcccagtcagccaggattgtgagctgtttgggaagtttcgtggaagcgcccaagtgccagcacaggtggagggacacctggaggccagtttcaggaacttttgccacaagtataaaagacttcagaagtgcaaagatgctgaaacagatactgtcggagatgtacatagatcctgatctactggcagagctcagcgaagaacagaaacagatcctgttcttcaagatgagagaggaacagatccgacgatggaaagaaagagaagcagctatggaaagaaaggagtccctgccagtgaaacccagaccaaagaaagagaatggcaaatcggttcattggaaacttggagctgataaggaagtctgggtatgggtgatgggcgaacaccatctagataaaccctatgatgtgctctgtaatgaaattattgctgagagggcccggctgaaagcagaacaggaggcagaagagcccagaaaaactcactctgaagaattcaccaatagcttgaaaacaaaatcacagtaccatgatctgcaggctccggataaccagcagactaaagacatctggaagaaagtggcagaaaaggaggaactggagcaaggatctaggccagcaccaaccctggaagaagagaaaatccgatcactctccagttcttcaagaaatattcaacaaatgttggcagattcaatcaatcgtatgaaggcatatgcatttcaccagaagaaagaatctatgaagaaaaaacaagatgaagaaataaatcaaatagaagaagagagaacgaagcagatttgtaagagctggaaagaagactcggaatggcaggcatctctgcgaaaatccaaagcagctgatgagaagagacgctccttggctaaacaagcacgagaagactacaagaggttgtccctcggggcccagaaaggaagaggcggtgagaggctgcaaagccccttgcgtgttccgcagaaaccagaaagacctccccttccacccaagcctcagttcctaaactcaggggcatatcctcaaaaacctcttagaaatcagggagtggtgaggacactgtccagctctgcccaagaggacatcatccggtggtttaaagaggagcagctaccacttcgagcgggctaccagaaaacctcagacaccatagccccctggttccatggaattctcacactcaagaaagcaaatgaacttcttctgagcacaggcatgcccggcagttttctcatccgagtcagtgaaaggatcaaaggctatgccctgtcctatctgtcggaggacggctgtaaacatttcctcatcgatgcctctgcagacgcctacagcttcctgggcgtggaccagctacagcatgccaccttggcggatttggtggaatatcacaaggaggaacccatcacttccctggggaaggagctccttctctatccctgtggtcagcaggaccagctgcctgactacctggagctgtttgagtgacagcctccatcagggtcatcctacagcctccaagcgggctttcccctggacaaatgccactgcaacatttatgtgtgaagccaaaatcaccctgcagcagagccaatactgatcaactgaaagtaaagtatccatggagtcctcattgacacctcttttctgcacaaatactggaattcaatgtcaagagaaaatgacctctgctcaaaagggagaagagtctcaatttcagcaagtacctgtcatgaagggtatgaccttaatgatgtacataaaataaaacaaatgaagaaatggaaaacttttagaaattaaggtgtacttgaaaacgaatatctatcatatgacccctgcactccctctgtatcatctcaggaggtttcaggggcctgttgacatgaagtttcgaagtttcatgttggctttggaatggtagcaaaagcctttcctggctgagatgatgcttaaaacacacctcacttattgtacatgttggaaccaggacatgagagacatagaaaaacagaagtcatgaatgtaaattgaatgagaggcttaacatgcatgaaaatacagatggacctgcaggaaagtgagcaaacatcgctgagtttgttttcttgttcgggagaatggggccggggctggcctggcctcccctggatatactctatagtgcaccaaaaggataaagcatctgtacatgtatttttttattttttatcagaagtgcttagacaagaacagaataagcaggctgtttggatgctacttgtggttgaattgtgttcccccaaaatatatggtgaagtcttaacccccatccccgtgaatgggaccttgtttggaaatagggtctttgcagatatagtcaagatgaggtcacattggattagggtgggccccaaatccaatgactggcatccttaggagaagagagagttttggtaatagacacaaatgcagtgggaagaagaccaggggacaagaggcaagttggagtgatgcagccggaagggaagggacaccaaggatctccggccaccagcagaagccagcagagaggcatgggacaggttccccacaagccttagaaggaagcatggccctgacttcagaattccagactccagaactggaagaataaatgtctgttgttttaaaaaaaaaaaaaaaaaa

SEQ ID NO: 57 - DNA, 8838 bp, Homo Sapiens
cgccctcgagtggaggacgagaaggaaagcaccatgacgtccatccatttcgtggttcacccgctgccgggcaccgaggaccagctcaatgacaggttacgagaagtttctgagaagctgaacaaatataatttaaacagccacccccctttgaatgtattggaacaggctactattaaacagtgtgtggtgggaccaaatcatgctgcctttcttcttgaggatggtagagtttgcaggattggtttttcagtacagccagacagattggaattgggtaaacctgataataatgatgggtcaaagttgaacagcaactcgggggcagggaggacgtcaaggcctggtaggacaagcgactctccatggtttctctcaggttctgagactctaggcaggctggcaggcaacaccttaggaagccgctggagttctggagtgggtggaagtggtggaggatcctctggtaggtcatcagctggagctcgagattcccgccggcagactcgagttattcggacaggacgggatcgagggtctgggcttttgggcagtcagccccagccagttattccagcatctgtcattccagaggagctgatttcacaggcccaagttgttttacaaggcaaatccagaagtgtcattattcgagaacttcagagaacaaatcttgatgtgaaccttgctgtaaataatttacttagccgggatgatgaagatggagatgatggggatgatacagccagcgaatcttatttgcctggagaggatcttatgtctctccttgatgccgacattcattctgcccacccaagtgtcattattgatgcagatgccatgttttctgaagacattagctattttggttacccttcttttcgtcgttcatcactttccaggctaggctcatctcgagttctccttcttcccttagagagagactctgagctgttgcgtgaacgtgaatccgttttacgtttacgtgaacgaaggtggcttgatggagcctcatttgataatgaaaggggttctaccagcaaggaaggagagccaaacttggataagaagaatacacctgttcaaagtccagtatctctaggagaagatttgcagtggtggcctgataaggatggaacaaaattcatctgtattggggctctgtattctgaacttctggctgtcagcagtaaaggagaactttatcagtggaaatggagtgaatctgagccttacagaaatgcccagaatccttcattacatcatccacgagcaacatttttggggttaaccaatgaaaagatagtcctcctgtctgcaaatagcataagagcaactgtagctacagaaaataacaaggttgctacatgggtggatgaaactttaagttctgtggcttctaaattagagcacactgctcagacttactctgaacttcaaggagagcggatagtttctttacattgctgtgccctttacacctgcgctcagctggaaaacagtttatattggtggggtgtagttccttttagtcaaaggaagaaaatgttagagaaagctagagcaaaaaataaaaagcctaaatccagtgctggtatttcttcaatgccgaacatcactgttggtacccaggtatgcttgagaaataatcctctttatcatgctggagcagttgcattttcaattagtgctgggattcctaaagttggtgtcttaatggagtcagtttggaatatgaatgacagctgtagatttcaacttagatctcctgaaagcttgaaaaacatggaaaaagctagcaaaactactgaagctaagcctgaaagtaagcaggagccagtgaaaacagaaatgggtcctccaccatctccagcatccacgtgtagtgatgcatcctcaattgccagcagtgcatcaatgccatacaaacgacgacggtcaacccctgcaccaaaagaagaggaaaaggtgaatgaagagcagtggtctcttcgggaagtggtttttgtggaagatgtcaagaatgttcctgttggcaaggtgctaaaagtagatggtgcctatgttgctgtaaaatttccaggaacctccagtaatactaactgtcagaacagctctggtccagatgctgacccttcttctctcctgcaggattgtaggttacttagaattgatgaattgcaggttgtcaaaactggtggaacaccgaaggttcccgactgtttccaaaggactcctaaaaagctttgtatacctgaaaaaacagaaatattagcagtgaatgtagattccaaaggtgttcatgctgttctgaagactggaaattgggtgcgatactgtatctttgatcttgctacaggaaaagcagaacaggaaaataattttcctacaagcagcattgctttccttggtcagaatgagaggaatgtagccattttcactgctggacaggaatctcccattattcttcgagatggaaatggtaccatctacccaatggccaaagattgcatgggaggaataagggatcccgattggctggatcttccacctattagtagtcttggaatgggtgtgcattctttaataaatcttcctgccaattcaacaatcaaaaagaaagctgctgttatcatcatggctgtagagaaacaaaccttaatgcaacacattctgcgctgtgactatgaggcctgtcgacaatatctaatgaatcttgagcaagcggttgttttagagcagaatctacagatgctgcagacattcatcagccacagatgtgatggaaatcgaaatattttgcatgcttgtgtatcagtttgctttccaaccagcaataaagaaactaaagaagaagaggaagcggagcgttctgaaagaaatacatttgcagaaaggctttctgctgttgaggccattgcaaatgcaatatcagttgtttcaagtaatggcccaggtaatcgggctggatcatcaagtagccgaagtttgagattacgggaaatgatgagacgttcgttgagagcagctggtttgggtagacatgaagctggagcttcatccagtgaccaccaggatccagtttcaccccccatagctccccctagttgggttcctgaccctcctgcgatggatcctgatggtgacattgattttatcctggcccccgctgtgggatctcttaccacagcagcaaccggtactggtcaaggaccaagcacctccactattccaggtccttccacagagccatctgtagtagaatccaaggatcgaaaggcgaatgctcattttatattgaaattgttatgtgacagtgtggttctccagccctatctacgagaacttctttctgccaaggatgcaagagggatgaccccatttatgtcagctgtaagtggccgagcttatcctgctgcaattaccatcttagaaactgctcagaaaattgcaaaagctgaaatatcctcaagtgaaaaagaggaagatgtattcatgggaatggtttgcccatcaggtaccaaccctgatgactctcctttatatgttttatgttgtaatgacacttgcagttttacatggactggagcagagcacattaaccaggatatttttgagtgtcgaacttgtggcttgctggagtcactgtgttgttgtacggaatgtgcaagggtttgtcataaaggtcatgattgcaaactcaaacggacatcaccaacagcctactgtgattgttgggagaaatgtaaatgtaaaactcttattgctggacagaaatctgctcgtcttgatctactttatcgcctgctcactgctactaatctggttactctgccaaacagcaggggagagcacctcttactattcttagtacagacagtcgcaaggcagacggtggagcattgtcaatacaggccacctcgaatcagggaagatcgtaaccgaaaaacagccagtcctgaagattcagatatgccagatcatgatttagagcctccaagatttgcccagcttgcattggagcgtgttctacaggactggaatgccttgaaatctatgattatgtttgggtcgcaggagaataaagaccctcttagtgccagcagtagaataggccatcttttgccagaagagcaagtatacctcaatcagcaaagtggcacaattcggctggactgtttcactcattgccttatagttaagtgtacagcagatattttgcttttagatactctactaggtacactagtgaaagaactccaaaacaaatatacacctggacgtagagaagaagctattgctgtgacaatgaggtttctacgttcagtggcaagagtttttgttattctgagtgtggaaatggcttcatccaaaaagaaaaacaactttattccacagccaattggaaaatgcaagcgtgtattccaagcattgctaccttacgctgtggaagaattgtgcaacgtagcagagtcactgattgttcctgtcagaatggggattgctcgtccaactgcaccatttaccctggctagtactagcatagatgccatgcagggcagtgaagaattattttcagtggaaccactaccaccacgaccatcatctgatcagtctagcagctccagtcagtctcagtcatcctacatcatcaggaatccacagcagaggcgcatcagccagtcacagcccgttcggggcagagatgaagaacaggatgatattgtttcagcagatgtggaagaggttgaggtggtggagggtgtggctggagaagaggatcatcatgatgaacaggaagaacacggggaagaaaatgctgaggcagagggacaacatgatgagcatgatgaagacgggagtgatatggagctggacttgttagcagcagctgaaacagaaagtgatagtgaaagtaaccacagcaaccaagataatgctagtgggcgcagaagcgttgtcactgcagcaactgctggttcagaagcaggagcaagcagtgttcctgccttcttttctgaagatgattctcaatcgaatgactcaagtgattctgatagcagtagtagtcagagtgacgacatagaacaggagacctttatgcttgatgagccattagaaagaaccacaaatagctcccatgccaatggtgctgcccaagctccccgttcaatgcagtgggctgtccgcaacacccagcatcagcgagcagccagtacagccccttccagtacatctacaccagcagcaagttcagcgggtttgatttatattgatccttcaaacttacgccggagtggtaccatcagtacaagtgctgcagctgcagcagctgctttggaagctagcaacgccagcagttacctaacatctgcaagcagtttagccagggcttacagcattgtcattagacaaatctcggacttgatgggccttattcctaagtataatcacctagtatactctcagattccagcagctgtgaaattgacttaccaagatgcagtaaacttacagaactatgtagaagaaaagcttattcccacttggaactggatggtcagtattatggattctactgaagctcaattacgttatggttctgcattagcatctgctggtgatcctggacatccaaatcatcctcttcacgcttctcagaattcagcgagaagagagaggatgactgcgcgagaagaagctagcttacgaacacttgaaggcagacgacgtgccaccttgcttagcgcccgtcaaggaatgatgtctgcacgaggagacttcctaaattatgctctgtctctaatgcggtctcataatgatgagcattctgatgttcttccagttttggatgtttgctcattgaagcatgtggcatatgtttttcaagcacttatatactggattaaggcaatgaatcagcagacaacattggatacacctcaactagaacgcaaaaggacgcgagaactcttggaactgggtattgataatgaagattcagaacatgaaaatgatgatgacaccaatcaaagtgctactttgaatgataaggatgatgactctcttcctgcagaaactggccaaaaccatccatttttccgacgttcagactccatgacattccttgggtgtatacccccaaatccatttgaagtgcctctggctgaagccatccccttggctgatcagccacatctgttgcagccaaatgctagaaaggaggatctttttggccgtccaagtcagggtctttattcttcatctgccagtagtgggaaatgtttaatggaggttacagtggatagaaactgcctagaggttcttccaacaaaaatgtcttatgctgccaatctgaaaaatgtaatgaacatgcaaaaccggcaaaaaaaagaaggggaagaacagcccgtgctgccagaagaaactgagagttcaaaaccagggccatctgctcatgatcttgctgcacaattaaaaagtagcttactagcagaaataggacttactgaaagtgaagggccacctctcacatctttcaggccacagtgtagctttatgggaatggttatttcccatgatatgctgctaggacgttggcgcctttctttagaactgttcggcagggtattcatggaagatgttggagcagaacctggatcaatcctaactgaattgggtggttttgaggtaaaagaatcaaaattccgcagagaaatggaaaaactgagaaaccagcagtcaagagatttgtcactagaggttgatcgggatcgagatcttctcattcagcagactatgaggcagcttaacaatcactttggtcgaagatgtgctactacaccaatggctgtacacagagtaaaagtcacatttaaggatgagccaggagagggcagtggtgtagcacgaagtttttatacagccattgcacaagcatttttatcaaatgaaaaattgccaaatctagagtgtatccaaaatgccaacaaaggcacccacacaagtttaatgcagagattaaggaaccgaggagagagagaccgggaaagggagagagaaagggaaatgaggaggagtagtggtttgcgagcaggttctcggagggaccgggatagagactttagaagacagctttccatcgacactaggccctttagaccagcctctgaagggaatcctagcgatgatcctgagcctttgccagcacatcggcaggcacttggagagaggctttatcctcgtgtacaagcaatgcaaccagcatttgcaagtaaaatcactggcatgttgttggaattatccccagctcagctgcttctccttctagcaagtgaggattctctgagagcaagagtggatgaggccatggaactcattattgcacatggacgggaaaatggagctgatagtatcctggatcttggattagtagactcctcagaaaaggtacagcaggaaaaccgaaagcgccatggctctagtcgaagtgtagtagatatggatttagatgatacagatgatggtgatgacaatgcccctttgttttaccaacctgggaaaagaggattttatactccaaggcctggcaagaacacagaagcaaggttgaattgtttcagaaacattggcaggattcttggactatgtctgttacagaatgaactctgtcctatcacattgaatagacatgtaattaaagtattgcttggtagaaaagtcaattggcatgattttgctttttttgatcctgtaatgtatgagagtttgcggcaactaatcctcgcgtctcagagttcagatgctgatgctgttttctcagcaatggatttggcatttgcaattgacctgtgtaaagaagaaggtggaggacaggttgaactcattcctaatggtgtaaatataccagtcactccacagaatgtatatgagtatgtgcggaaatacgcagaacacagaatgttggtagttgcagaacagcccttacatgcaatgaggaaaggtctactagatgtgcttccaaaaaattcattagaagatttaacggcagaagattttaggcttttggtaaatggctgcggtgaagtcaatgtgcaaatgctgatcagttttacctctttcaatgatgaatcaggagaaaatgctgagaagcttctgcagttcaagcgttggttctggtcaatagtagagaagatgagcatgacagaacgacaagatcttgtttacttttggacatcaagcccatcactgccagccagtgaagaaggattccagcctatgccctcaatcacaataagaccaccagatgaccaacatcttcctactgcaaatacttgcatttctcgactttacgtcccactctattcctctaaacagattctcaaacagaaattgttactcgccattaagaccaagaattttggttttgtgtagagtataaaaagtgtgtattgctgtgtaatattactagcaaattttgtagatttttttccatttgtctataaaagttaaagtttatggaagttaatgctgtcatacccccctggtggtaccttaaagagataaaatgcagacattccttgctgagtttatagcttaaaggcctaaggagcactagcaacatttggctatattggtttgctagtcaccaacttctgggtctaaccccagccaaagatgacagcagaacaacataatttacactgtgatttatctttttgctgaggggaaaaaaatgtaaatgttctgaaaattcactgctgcctttgtggaaactgtttcagcaaaggttcttgtatagagggaatagggaatttcaaaataaaaaattaagtatgt

SEQ ID NO: 58 - DNA, 2916 bp, Homo Sapiens
  misc_feature (2534)..(2534): n is a, c, g, or t
  misc_feature (2536)..(2536): n is a, c, g, or t
ggggagctcggcgtcccgctccctccgcggctcatggcgacgactctcggcacatccgggaccctccggccgtggcggccgaggcgccggctgctcgggccccagccccggccgctgtggtgactccgccgcgcctcgccgtcgcccccgtgccgcccgccgcccccgccgcccccgccgccggggacatgtctaaccccggaggccggaggaacgggcccgtcaagctgcgcctgacagtactctgtgcaaaaaacctggtgaaaaaggattttttccgacttcctgatccatttgctaaggtggtggttgatggatctgggcaatgccattctacagatactgtgaagaatacgcttgatccaaagtggaatcagcattatgacctgtatattggaaagtctgattcagttacgatcagtgtatggaatcacaagaagatccataagaaacaaggtgctggatttctcggttgtgttcgtcttctttccaatgccatcaaccgcctcaaagacactggttatcagaggttggatttatgcaaactcgggccaaatgacaatgatacagttagaggacagatagtagtaagtcttcagtccagagaccgaataggcacaggaggacaagttgtggactgcagtcgtttatttgataacgatttaccagacggctgggaagaaaggagaaccgcctctggaagaatccagtatctaaaccatataacaagaactacgcaatgggagcgcccaacacgaccggcatccgaatattctagccctggcagacctcttagctgctttgttgatgagaacactccaattagtggaacaaatggtgcaacatgtggacagtcttcagatcccaggctggcagagaggagagtcaggtcacaacgacatagaaattacatgagcagaacacatttacatactcctccagacctaccagaaggctatgaacagaggacaacgcaacaaggccaggtgtatttcttacatacacagactggtgtgagcacatggcatgatccaagagtgcccagggatcttagcaacatcaattgtgaagagcttggtccattgcctcctggatgggagatccgtaatacggcaacaggcagagtttatttcgttgaccataacaacagaacaacacaatttacagatcctcggctgtctgctaacttgcatttagttttaaatcggcagaaccaattgaaagaccaacagcaacagcaagtggtatcgttatgtcctgatgacacagaatgcctgacagtcccaaggtacaagcgagacctggttcagaaactaaaaattttgcggcaagaactttcccaacaacagcctcaggcaggtcattgccgcattgaggtttccagggaagagatttttgaggaatcatatcgacaggtcatgaaaatgagaccaaaagatctctggaagcgattaatgataaaatttcgtggagaagaaggccttgactatggaggcgttgccagggaatggttgtatctcttgtcacatgaaatgttgaatccatactatggcctcttccagtattcaagagatgatatttatacattgcagatcaatcctgattctgcagttaatccggaacatttatcctatttccactttgttggacgaataatgggaatggctgtgtttcatggacattatattgatggtggtttcacattgcctttttataagcaattgcttgggaagtcaattaccttggatgacatggagttagtagatccggatcttcacaacagtttagtgtggatacttgagaatgatattacaggtgttttggaccataccttctgtgttgaacataatgcatatggtgaaattattcagcatgaacttaaaccaaatggcaaaagtatccctgttaatgaagaaaataaaaaagaatatgtcaggctctatgtgaactggagatttttacgaggcattgaggctcaattcttggctctgcagaaaggatttaatgaagtaattccacaacatctgctgaagacatttgatgagaaggagttagagctcattatttgtggacttggaaagatagatgttaatgactggaaggtaaacacccggttaaaacactgtacaccagacagcaacattgtcaaatggttctggaaagctgtggagttttttgatgaagagcgacgagcaagattgcttcagtttgtgacaggatcctctcgagtgcctctgcagggcttcaaagcattgcaaggtgctgcaggcccgagactctttaccatacaccagattgatgcctgcactaacaacctgccgaaagcccacacttgcttcaatcgaatagacattccaccctatgaaagctatgaaaagctatatgaaaagctgctaacagccattgaagaaacatgtggatttgctgtggaatgacaagcttcaaggatttacccaggactctatttatacaaccctgactgacagcctcctttcagcagagtttcaaagaatatgctgaaatacaggaaaacncncccccccccccccttttttttttttttttacattttaggacactgtgaggggaaaggacaattttgaaattccttttcaaggaaaaaaaggtctttatgctttgccatgaggccacattcagctgctatttaaacttaatatcttgaacctaaagaatgctgacttttcctacatttccagagttaggcagtattctacacttaaagactactactatttttataaaaggtaatctattcaaatttcttcacagatttcaagtctctcaaacatcaagacaacttcagcagtcggtacaagtcacatttcattttgattgaatacatgatcttgaacagctcctgtacttgctctttgtaaaaaaaaataaaattatttt

SEQ ID NO: 59 - DNA, 1854 bp, Homo Sapiens
cttttccggcccgcagcgcggcctgggctcccgcgtgtttaaaagtgcgcttgtggctgctgctgtcttaactcctgtgcttggcggacagacaggcgagatggcggcggaggtgttgccgagtgcgaggtggcagtattgtggggcgcccgacgggagccagagagctgtactggtccagttctccaacgggaagctacagagtccaggcaacatgcgctttaccttgtatgagaacaaagattccaccaaccccaggaagaggaatcaacggatcctggcagctgaaacagataggctctcctatgtgggaaacaattttgggactggagccctcaaatgcaacactttgtgcaggcactttgtgggaattttgaacaagacctctggccaaatggaagtatatgatgctgaattgttcaacatgcagccactattttcagatgtatcagttgagagtgaactggcgctagagagtcagaccaaaacttacagagaaaagatggattcttgtattgaagcctttggtaccaccaaacagaagcgagctctgaacaccaggagaatgaacagagttggcaatgaatctttgaatcgtgcagtggctaaagctgcagagactatcattgatacgaagggtgtgactgctctggtcagcgatgctatccacaatgacttgcaagatgactccctctaccttcctccctgctatgatgatgcagccaagcctgaagacgtgtataaatttgaagatcttctttcccctgcggagtatgaagctcttcagagcccatctgaagctttcaggaacgtcacgtcagaagaaatactgaagatgattgaggagaacagccattgcacctttgtcatagaagcgttgaagtctttgccatcagatgtggagagccgagaccgccaggcccgatgcatatggtttctggataccctcatcaaatttcgagctcatagggtagttaagcggaaaagtgctctgggacctggagttccccacatcatcaacaccaaactgctgaagcactttacttgcttgacctacaacaatggcagattacggaacttaatttcggattctatgaaggcgaagattactgcatatgtgatcatacttgccttgcacatacatgacttccaaattgacctgacagtgttacagagggacttgaagctcagtgagaaaaggatgatggagatagccaaagccatgaggctgaagatctccaaaagaagggtgtctgtggccgccggcagtgaagaagatcacaaactgggcaccctgtccctcccgctgcctccagcccagacctcagaccgcctggcaaagcggaggaagattacctagacgcatgctttccagacagggcgttttggctgcatcacagccactggctggtcctattcatttccatttttatgtatgttttgaaaagaaaaggtccggggatggtggctcacacctgaaatcccagcactttgggaggccgaggcaggaagatcattgagctcaggagtttgaaaccagtctggacaacatggggagaccccatctctaccggaggaaaaaaaaaagagtcaggcctggtggtgtgcgcctgtaatcccagctactcgggaggctgaggcaggacgattacttgagcttgggaaatcaaggttgcagtgagctatgattgtgtggccacactccatcctgggtcacagagtgagaccttgtctcaaaaaagtaacataaggaaaaaagaagccttgctttagcacaggtatgaagccagaagccagcatctcaactgtgcttgtcttatgcagaaatataaagcgatggccaggttggacttc

SEQ ID NO: 60 - DNA, 1438 bp, Homo Sapiens
cggtaactaccccggctgcgcacagctcggcgctccttcccgctccctcacacaccgcctcagcccgcaccggcagtagaagatggtgaaagaaacaacttactacgatgttttgggggtcaaacccaatgctactcaggaagaattgaaaaaggcttataggaaactggccttgaagtaccatcctgataagaacccaaatgaaggagagaagtttaaacagatttctcaagcttacgaagttctctctgatgcaaagaaaagggaattatatgacaaaggaggagaacaggcaattaaagagggtggagcaggtggcggttttggctcccccatggacatctttgatatgttttttggaggaggaggaaggatgcagagagaaaggagaggtaaaaatgttgtacatcagctctcagtaaccctagaagacttatataatggtgcaacaagaaaactggctctgcaaaagaatgtgatttgtgacaaatgtgaaggtagaggaggtaagaaaggagcagtagagtgctgtcccaattgccgaggtactggaatgcaaataagaattcatcagataggacctggaatggttcagcaaattcagtctgtgtgcatggagtgccagggccatggggagcggatcagtcctaaagatagatgtaaaagctgcaacggaaggaagatagttcgagagaagaaaattttagaagttcatattgacaaaggcatgaaagatggccagaagataacattccatggtgaaggagaccaagaaccaggactggagccaggcgatattatcattgtgttagatcagaaggaccatgctgtttttactcgacgaggagaagaccttttcatgtgtatggacatacagctcgttgaagcactgtgtggcttccagaagccaatatctactcttgacaaccgaaccatcgtcatcacctctcatccaggtcagattgtcaagcatggagatatcaagtgtgtactaaatgaaggcatgccaatttatcgtagaccatatgaaaagggtcgcctaatcatcgaatttaaggtaaactttcctgagaatggctttctctctcctgataaactgtctttgctggaaaaactcctacccgagaggaaggaagtggaagagactgatgagatggaccaagtagaactggtggactttgatccaaatcaggaaagacggcgccactacaatggagaagcatatgaggatgatgaacatcatcccagaggtggtgttcagtgtcagacctcttaatggccagtgaataacactcactgctggcatttaatgtgcagtagtgaatgagtgaaggactgtaatcataatatgctcactacttgctcttgtttttgttttaataaactatagtagtgttataaaaagttaaatgaagaataaacgcaaatataaaagctc

SEQ ID NO: 61 - DNA, 21 bp, Homo Sapiens
cgccacgatggccgaatggcc

SEQ ID NO: 62 - DNA, 2032 bp, Homo Sapiens
caccccgcagcccggcctcggcctccgccgcttgttgtcgcgccccgcccgcgagcccgccccgcacgtcccccgccggcggccaccatgagcacaggcctgcggtacaagagcaagctggcgaccccagaggacaagcaggacattgacaagcagtacgtgggcttcgccacactgcccaaccaggtgcaccgcaagtcggtgaagaaaggctttgacttcacactcatggtggctggtgagtcaggcctggggaagtccacactggtccacagcctcttcctgacagacttgtacaaggaccggaagctgctcagtgctgaggagcgcatcagccagacggtagagattctaaaacacacggtggacattgaggagaagggagtcaagctgaagctcaccatcgtggacacgccgggattcggggacgctgtcaacaacaccgagtgctggaagcccatcaccgactatgtggaccagcagtttgagcagtacttccgtgatgagagcggcctcaaccgaaagaacatccaagacaaccgagtgcactgctgcctatacttcatctcccccttcgggcatgggctgcggccagtggatgtgggtttcatgaaggcattgcatgagaaggtcaacatcgtgcctctcatcgccaaagctgactgtcttgtccccagtgagatccggaagctgaaggagcggatccgggaggagattgacaagtttgggatccatgtataccagttccctgagtgtgactcggacgaggatgaggacttcaagcagcaggaccgggaactgaaggagagcgcgcccttcgccgttataggcagcaacacggtggtggaggccaaggggcagcgggtccggggccgactgtacccctgggggatcgtggaggtggagaaccaggcgcattgcgacttcgtgaagctgcgcaacatgctcatccgcacgcatatgcacgacctcaaggacgtgacgtgcgacgtgcactacgagaactaccgcgcgcactgcatccagcagatgaccagcaaactgacccaggacagccgcatggagagccccatcccgatcctgccgctgcccaccccggacgccgagactgagaagcttatcaggatgaaggatgaggaactgaggcgcatgcaggagatgctgcagaggatgaagcagcagatgcaggaccagtgacgctcgccgcggacacaccgtccgtctccgggacgccctcgcacccctggacaccagaccggactgttcccgacccggagacgcggggccacagcccccagctgaccctaatttattctcagcaccaccccctcccaggtcattgtgtctgtttccgaggggcctggaccgtagcccccgcccagctggccctctctgaccttgggggatcaggagcgaagttgggcgggacttcagagatccgcctcccttgcccttcccccgcccccggacggtcacagcacccaaaccgcaggccctgctctggcaggcaggcaaagctaggcagaagaggattcccaggatcctgggtctgttccctgccccagtgctgcagaacggacttgggagccctcctttgcctgctcccgcgggtcacccagcgagtgctgagaccccattttctgtcgaggcgggccgagtcttcccttatccccagacgcctagcgggcagggttgggctgaatcaaatgggagccctccagacataaggaggccagaggctgcaaggagcggggtcgtgaccgcttacaccccttctccacagcccggcccgacctggagggcccccggggcactgggcggtgagccacctcctggcaactctcggtgccgtcccctgccctcgctcgaggcctcttctccccagcaccgctgtggtgtgccgggatcctgagcctaggcctcccgatgttcccacccgcatgatcccttcccgccacacgatgctccgttttcttccgttgtgaatgccgcgtcctgtcctggtgacaggagaacaatgttggtgaacgtc

SEQ ID NO: 63 - DNA, 1824 bp, Homo Sapiens
ctgggggtcagagagaagggagaggcctccttctgaggggcggcttgataccggtggaggagctccaggaagcaggcaggccttggtctgagacagtgtcctcaggtcgcagagcagaggagacccaggcagtgtcagcagtgaaggttctcgggacaggctaaccaggaggacaggagccccaagaggccccagagcagcactgacgaagacctgcctgtgggtctccatcgcccagctcctgcccacgctcctgactgctgccctgaccagagtcatcatgtctctcgagcagaggagtccgcactgcaagcctgatgaagaccttgaagcccaaggagaggacttgggcctgatgggtgcacaggaacccacaggcgaggaggaggagactacctcctcctctgacagcaaggaggaggaggtgtctgctgctgggtcatcaagtcctccccagagtcctcagggaggcgcttcctcctccatttccgtctactacactttatggagccaattcgatgagggctccagcagtcaagaagaggaagagccaagctcctcggtcgacccagctcagctggagttcatgttccaagaagcactgaaattgaaggtggctgagttggttcatttcctgctccacaaatatcgagtcaaggagccggtcacaaaggcagaaatgctggagagcgtcatcaaaaattacaagcgctactttcctgtgatcttcggcaaagcctccgagttcatgcaggtgatctttggcactgatgtgaaggaggtggaccccgccggccactcctacatccttgtcactgctcttggcctctcgtgcgatagcatgctgggtgatggtcatagcatgcccaaggccgccctcctgatcattgtcctgggtgtgatcctaaccaaagacaactgcgcccctgaagaggttatctgggaagcgttgagtgtgatgggggtgtatgttgggaaggagcacatgttctacggggagcccaggaagctgctcacccaagattgggtgcaggaaaactacctggagtaccggcaggtgcccggcagtgatcctgcgcactacgagttcctgtggggttccaaggcccacgctgaaaccagctatgagaaggtcataaattatttggtcatgctcaatgcaagagagcccatctgctacccatccctttatgaagaggttttgggagaggagcaagagggagtctgagcaccagccgcagccggggccaaagtttgtggggtcagggccccatccagcagctgccctgccccatgtgacatgaggcccattcttcgctctgtgtttgaagagagcaatcagtgttctcagtggcagtgggtggaagtgagcacactgtatgtcatctctgggttccttgtctattgggtgatttggagatttatccttgctcccttttggaattgttcaaatgttcttttaatggtcagtttaatgaacttcaccatcgaagttaatgaatgacagtagtcacacatattgctgtttatgttatttaggagtaagattcttgcttttgagtcacatggggaaatccctgttattttgtgaattgggacaagataacatagcagaggaattaataatttttttgaaacttgaacttagcagcaaaatagagctcataaagaaatagtgaaatgaaaatgtagttaattcttgccttatacctctttctctctcctgtaaaattaaaacatatacatgtatacctggatttgcttggcttctttgagcatgtaagagaaataaaaattgaaagaataaaaaaaaaaaaaaaaaaa

SEQ ID NO: 64 - DNA, 8788 bp, Homo Sapiens
gaggcgcggcggcgcatgcggatcaggctgagccgcgggccggcggggccgagctgagccgggctgggccgggccgggccgggccgggcagcggacgccgacagggagggcggtcggtcgcggcgagcagcggagacagcgacgctggcggccgcgggcccaggcctcaccttccccgatggcgcaggtaccaggggaagtggacaacatggagggcctgcctgctcctaacaacaaccctgctgcccgctgggagagtccggatcggggctgggagcgggagcagccggctgcgtccaccgcagcggcctcgctctttgagtgctcccggatcaaggccttggcagatgagcgggaagccgtgcagaagaaaaccttcaccaagtgggtgaactcgcacctcgcccgcgtgggctgccacatcggggacctctatgtggacctccgggacggcttcgtgctcacgcggctcctggaagtgctgtctggggagcagctgcccaggcccacgcgcggccgcatgcggatccactcactggagaacgtggacaaggcgctgcagtttctgaaggagcagcgcgtgcacctggagaacgtgggttcgcatgacatcgtggatgggaatcaccggctgacgctggggctggtctggaccatcatcctgcgcttccagattcaagtcatcaaaattgagactgaggacaacagagagacacgctcagccaaggatgctctgctcttgtggtgtcagatgaagacagctggttaccctgaggtaaacatccagaatttcaccaccagctggcgggatggcttggccttcaatgccctcattcaccggcacaggcctgatctcgtggacttcagcaaactcaccaagtccaatgccaactacaacctgcagagagccttccgcacagctgagcagcacctggggctggcgcggctgctggatcctgaagatgtgaacatggaggctccagatgagaagtccatcatcacctacgtggtctctttctaccactatttctccaagatgaaggctctggctgtggaggggaagcgtatcgggaaggtcttggaccaggtattggaggtggggaagatcatagaacgctacgaggagctggcggctgagctgctggcctggatccaccgcaccgtgggcctcatcagcaatcagaaatttgccaactccttaagtggggtgcagcagcaactccaggctttcacggcctattgcacgctggagaagcctgtcaagttccaggagaaggggaacctagaggtgctgctcttcagcatccagagcaaactgcgtgcctgcaaccgtcgcctctttgtgcctcgggagggctgtggcatctgggatattgacaaggcatggggtgagctggagaaggctgagcatgagcgggaggctgccctacgggctgagctgattcggcaggagaagctggaactactggcacagaggtttgaccacaaggtggctatgagggagagctggctgaatgagaaccagcgtctggtctcccaggacaactttgggtatgagctgcccgcagtggaggcagccatgaagaaacacgaagcgatcgaggcagacattgcggcctacgaggagcgggtgcagggtgtggcggagctggcccaggcattggcagccgaaggctactacgatatccggcgggtggcagcccagcgtgacagcgtcctgcgccagtgggccctgctaactgggcttgtgggtgcccggcggacacgacttgagcagaaccttgccctgcagaaggtcttccaggagatggtgtacatggtggactggatggaggagatgcaggctcagctgctgtcccgggagtgtgggcagcacctggtggaggcagacgacctgttgcagaagcatggactgctggagggagacattgccgcccagagcgagcgggtggaggctctcaatgccgctgccctgcgcttctcccagccctgcgacccgcaggtcatctgcaaccgcgtgaaccacgtgcacggctgcctggcggagctgcaggagcaggcagcgcggcgacgcgcggagctggaggcttcgcggagcctgtgggcgctgctgcaggagctggaggaggccgagagctgggcgcgcgacaaggagcgtctcctggaggctgcgggcggcggcggtgcggcgggcgcagcgggcgcagcgggaacagcgggcggcgcgcatgacctgtccagcacagcgcgcctcctggcccagcacaagatcctgcagggcgagctgggcgggcggcgagcgtcgctgcagcaggccctgcggtgtggcgaggagctggttgcggccggcggtgccgtcggcccgggagcagacaccgtgcacctggtaggcctggcggagcgcgcggcgagcgcccggcgccgctggcagaggctggaagaggcggcggcgcggcgagagcggcggctgcaggaggcgcgggcgctgcaccagttcggcgctgacctcgacgggctgctggactggcttcgcgacgcttaccgcctggcagccgccggtgacttcggccacgacgaagcttccagccgccgcctggcgcgccagcaccgcgcgctcaccggggaggtggaggcacatcgcgggcccgtgagcggcctgcggcgccagctggcgacactcgggggtgccagtggcgcagggccactggtggtggcgctgcaggtgcgcgtggtggaagcagagcagttgttcgctgaggtgaccgaagtggcggcgctgaggcgccagtggctgcgggacgcgctcgctgtctaccgcatgtttggcgaggtgcacgcgtgtgagctgtggatcggcgagaaggagcaatggctgctctccatgcgtgtgccggattcactcgacgacgtcgaggtggtgcagcaccgattcgagagcctggaccaagagatgaacagcctgatgggccgcgttctggacgtgaaccacacagtccaggagctggtggaaggaggccaccccagttcagatgaggtgcgttcctgccaggaccacctcaacagcaggtggaaccgcatcgtggagctagtggaacagcgcaaagaggaaatgagcgcggtgctgctggtggagaaccacgtgctggaggtggccgaggtgcgcgcccaggtgcgtgagaagcggagagctgtggagagcgcgccccgggccggcggcgccctgcagtggcgtcttagcggcctagaggccgctctgcaggcgctggagccgcgccaggcggcccttctggaggaggcagccctgctggctgagcgcttcccggcgcaggcggcgcggctgcaccagggcgcggaggagctgggcgccgagtggggcgcgctagctagcgcggctcaggcctgcggcgaggcggtggcggcagcagggcgcctgcagcgcttcctacatgacctcgacgctttcctggactggctcgtgcgcgcccaggaggcggcgggcggcagcgaggggcccctgcccaacagcctagaagaggcggacgcgctgctggcgcgccacgctgcgctcaaggaggaggtggaccagcgcgaggaagactatgctcgcatcgtggcggccagcgaggcgctgctggccgccgacggcgcagagctgggcccgggcctggcactagacgagtggctgccacacctcgaacttggctggcataaactgctcggcttgtggaaggcgcgcaggaaggcgctggtccaggcgcacatctaccagctcttcctgcgggatctacgccaggcgctcgtggtgctgcgtaaccaggagatggcgctgtctggtgcggagctcccgggcacagtggaatcggtggaggaggccttgaaacagcaccgtgactttctcaccaccatggagctgagccagcaaaagatgcaggtggccgtgcaggctgcagagggcctgctgaggcagggcaacatctacggggagcaggctcaggaggctgtgacccggctgctggagaagaaccaagaaaaccagttacgggcccagcaatggatgcaaaagctacatgaccaacttgagctgcagcacttcctccgagactgccacgagctggatggctggatccatgagaagatgctgatggcgcgggatggcacgcgggaggacaaccacaagctgcataagagatggctccggcaccaggcattcatggccgagctggctcagaataaggagtggctggagaagatcgagcgggagggccagcaactgatgcaggagaagcccgaactggcggcctccgtgcggaagaagctgggcgagatccgccagtgctgggcggagctggagagcaccacccaggccaaggcacggcagctctttgaggccagcaaagcagaccagctggtgcagagctttgctgagctggacaagaagctccttcacatggagagccagctgcaagacgtggaccctggaggagacctggccactgtcaacagtcagctcaagaagctgcagtccatggagtcgcaggtggaggagtggtaccgcgaggtgggagagctgcaggcgcagacggcggcgctgccgctggagccggcgagcaaggagctggtgggtgagcggcagaacgcggtgggcgagcgcctggtgcgcctgctcgagccgttgcaggagcgccgccgcttgctgctggcttccaaggagttgcaccaggtggcgcacgacctggacgacgagctggcatgggttcaggagcggctgccactggccatgcagacagagcgaggcaacggtttgcaggcggtccagcagcacatcaaaaagaaccagggcctgcggcgggagatccaggcgcatgggccgcgcctggaggaggtgctggagcgcgcgggcgcgctggcgtcgctgcgcagcccggaggcagaggcagtgcgccggggcctggagcagctgcagagcgcctgggccggactgcgggaggctgccgagcgacggcagcaggtgctggacgccgccttccaggtggagcagtactacttcgacgtggctgaggtggaggcgtggctgggcgagcaggagctgctcatgatgagtgaggacaagggcaaggacgaacagagcaccctgcagctgctcaagaaacacctgcagctggagcaaggcgtggagaactacgaggaaagcatcgcgcagctgtcgcgccagtgccgggcgctgctggagatggggcacccggacagcgagcagatcagccggcggcagtctcaggtggaccgcctgtacgtggcgctcaaggagctgggtgaggagcgccgggtggctctggaacagcagtactggctgtaccagctcagccgccaggtgagcgagcttgagcactggattgccgagaaggaggtggtggctggctcacccgagctcggccaggactttgagcatgtctcggtgctgcaggagaaattctcagagtttgccagcgagacaggtatggcagggcgggaacggctggcagctgtgaaccagatggtggatgagctgatcgagtgtggccatacagcagcggccaccatggccgagtggaaggacggactgaacgaggcctgggctgagctgctggagctcatgggcacacgggcccagctgctggccgcctctcgggagcttcataagttcttcagtgacgcccgagagcttcagggacagattgaggagaagcggaggcggctgccccgcctgaccaccccgcctgagccgagacccagtgccagttccatgcagcggaccctgagagcctttgagcatgacctgcagctcctcgtgtcccaggtacggcagctgcaggagggggcggcccagctgcggacggtgtatgcgggtgaacatgccgaggccatcgctagccgggagcaggaggtgctgcagggttggaaagagctgctgtcagcctgtgaggatgcccgcctgcatgtcagctccacagccgacgccctgcgcttccacagccaagtccgcgacctgctctcctggatggatggcatcgccagccagattggggcagccgacaagcccagggacgtgtcatcagtggaggtgctcatgaactaccaccagggcctgaagactgagctggaggcgcgggtgcctgagctgaccacctgccaggagctggggcgatctctgctgctcaacaaaagtgccatggctgatgagatccaggcacagctggacaagctgggaaccaggaaggaggaggtgtcggaaaagtgggaccgccattgggagtggctgcagcagatgctggaggtgcaccagtttgcccaggaggcggtggtggctgatgcctggctgacagcccaggagccgctcctgcagagccgggagctgggcagcagcgtggatgaggtggagcagcttatccggcgacatgaggccttccgcaaagcggctgcagcctgggaagagaggttcagctctctgcggcgcctgaccacgatcgagaaaatcaaagcggaacagagcaagcagccgcctaccccactgctggggcgcaagttctttggggaccccacggaactggcggccaaggcggcgcccctgctgcggccagggggctatgaaaggggcttggagcccctggcccgccgagcctcggacacgctctcggccgaggtgcggactcgggtggggtatgtgcgccaggagctcaagcccgagcgcctccagccgcgcattgaccggctgccggagatcccggggagggtggagcccgcggccctgccggccgcaccagaggacgcggcggagacccccgcgacccccgcggcggcggagcaggtgcggccacgaccggagcgccaggagtcagctgatcgcgcggaggagctgcccaggaggcggcggcctgagcggcaagagtcagtcgatcaatccgaggaggctgcgcggaggcggcggccggagcggcaggagtcagcggagcacgaggcggcacacagccttaccctgggccgctatgagcagatggagcggcggcgcgagcggcgtgagcggcgcttggagcggcaggagtccagcgaacaggagatgcccatcagaggagacctggtcaaggggaaggccaccctggctgacattgtggaacagctgcaggagaaagaggcaggcccagggctgcctgctgggccgtcgctgcctcagccacgcgagcttcccccaggtcgcctgcccaacgggcttgagctgcccgagcggacacctcggccggaccggccccgggcgcgggaccggcccaagccgcgacggcggccgcggcccagagagggtggtgagggcgggggaagccggcgctcgcgctccgccccggcccagggcggctccgcccccgcgcctccgccaccgcccactcacacagtgcagcacgagggcttcctactgcgcaagcgcgagctcgacgctaaccgcaagtcgtccaaccggtcgtgggtgagcctgtactgtgtgcttagtaagggggaactgggcttctacaaggactccaagggcccggcatccgggagcacacacggtggggaaccgctgctcagcctgcacaaggccaccagcgaggtggctagtgactacaagaaaaagaagcatgtcttcaagctccagacccaggatggcagtgagtttttgctccaggcaaaagatgaggaggagatgaacggctggctggaggctgtagcttcctcggtggcggaacacgcagagatcgcccgctggggccagacactacccactacttcatccacagatgagggcaaccctaagagggaaggcggagatcgcagggccagcgggcgcaggaagtgacttcccacccccaggacctgacacatctcgtctcccctcttttccgcactgtgggcacaaagacactttttcttccgcaggggcgggagcccctagttccaacactgaggacgcgtgacatggtgggcaccggaaaggaggggacttctcctgcaccccaagaagtggtggggagattgctgcccctatagccatatctcggccccttcccactcaccacccccaccccaggtgctgggggtcccttatttttatgcaataactgagcttgatgggggtgggcagggggccagttgagccaagcccccagccccgatctgcagatcctgccccaagaagctggggtggtgggggcagtaattcctgcccccctctctgccctagggatgggcacgggggcgctggtgaggtcccctggaccatccagggtgctagggggcagggaggggacaccccctccccgcctttacctcacttccaatgctgccttgatctctgtctgggaggggggagtgaaggggccctagccccctgcactccgccgcctcagagccatgcggttaattcctgacttagtttatttttgcaaaacgtcgatctcctcctcccccgccccgcatccgcgaaggcttttaatgggaggggcgtcaaagctcaaaactgttttcctctctcctcccccctccagttgtaaatgccacttcatgaggggaggggcgaggggaagcccacccctgcatgcttctggctggagcacctccctggggagtcgggggattgggttgtgggcagtccccatggccgcctggagaagccgctggggcccgggggtgtggggcggtgtggcgggcgcacactgtatgtacctataataaaccctttggctttgaaaaaaaaaaaaaaaaaaaaaaaaaaaaaaaaaaaaaaaaa

SEQ ID NO: 65 - DNA, 3315 bp, Homo Sapiens
agttctcgcgggacaccgacggggagcggaagccaggaggtattgctgcttcggcgaccgggcggcggcagcggcggcggcggctgtggcagagtctgtgcctgtggcggtgacggcggcgggagcaagcgctgccctcgcagagcagccttggggtcgccggccgctcgcagcgttgtggaggggcgggccggacgctgagcggagcagctgcgccacgggtggcattgtgtgtcccagagtgccggagcgagtcccagaagagaggcgaggctaagcccagagcgctgggttgcttcagcagggaagactcccttccccctgcttcaggctgctgagcactgagcagcgctcagaatggaagccatcgccaaatatgacttcaaagctactgcagacgacgagctgagcttcaaaaggggggacatcctcaaggttttgaacgaagaatgtgatcagaactggtacaaggcagagcttaatggaaaagacggcttcattcccaagaactacatagaaatgaaaccacatccgtggttttttggcaaaatccccagagccaaggcagaagaaatgcttagcaaacagcggcacgatggggcctttcttatccgagagagtgagagcgctcctggggacttctccctctctgtcaagtttggaaacgatgtgcagcacttcaaggtgctccgagatggagccgggaagtacttcctctgggtggtgaagttcaattctttgaatgagctggtggattatcacagatctacatctgtctccagaaaccagcagatattcctgcgggacatagaacaggtgccacagcagccgacatacgtccaggccctctttgactttgatccccaggaggatggagagctgggcttccgccggggagattttatccatgtcatggataactcagaccccaactggtggaaaggagcttgccacgggcagaccggcatgtttccccgcaattatgtcacccccgtgaaccggaacgtctaagagtcaagaagcaattatttaaagaaagtgaaaaatgtaaaacacatacaaaagaattaaacccacaagctgcctctgacagcagcctgtgagggagtgcagaacacctggccgggtcaccctgtgaccctctcactttggttggaactttagggggtgggagggggcgttggatttaaaaatgccaaaacttacctataaattaagaagagtttttattacaaattttcactgctgctcctctttcccctcctttgtcttttttttcatccttttttctcttctgtccatcagtgcatgacgtttaaggccacgtatagtcctagctgacgccaataataaaaaacaagaaaccaagtgggctggtattctctctatgcaaaatgtctgttttagttggaatgactgaaagaagaacagctgttcctgtgttcttcgtatatacacacaaaaaggagcgggcagggccgctcgatgcctttgctgtttagcttcctccagaggaggggacttgtaggaatctgccttccagcccagacccccagtgtattttgtccaagttcacagtagagtagggtagaaggaaagcatgtctctgcttccatggcttcctgagaaagcccacctgggctgggcgcggtggctcacgcctgtaatcccagcactttgggaggccaaggtgggcggatcacaaggtcaggagttcgagaccaacctagccaacatggtgaaaccccgtctctactaaaaataagaaattagccgggtgtggcacgcacctgtagtcccagctacttgggagcctgaggcaggagaatcgcttgaacctgggaagtggaggttgagtgagccgggaccgtgccattgtactccagcctgggtgacagagcgagattccgtctcaaaaaaaaaaaaaaaaagcccacctgaaagcctgtctctttccactttgttggcccttccagtgggattatcgagcatgttgttttttcatagtgcctttttccttatttcaagggttgcttctgagtggtgttttttttttttttttaatttgttttgttttaaaataagttaaaggcagtccagagcttttcagccaatttgtctcctactctgtgtaaatatttttccctccgggcaggggagccagggtagagcaaaggagacaaagcaggagtggaaggtgaggcgttctcctgcttgtactaagccaggaggctttaagctccagctttaagggttgtgagccccttgggggttcagggaactgcttgcccagggtgcagtgtgagtgtgatgggccaccggggcaagagggaaggtgaccgcccagctctcccacatcccactggatctggcttacaggggggtcggaagcctgtcctcaccgtctcgggggttgtggcccccgccccctccctatatgcacccctggaaccagcaagtcccagacaaggagagcggaggaggaagtcatgggaacgcagcctccagttgtagcaggtttcactattcctatgctggggtacacagtgagagtactcacttttcacttgtcttgctcttagattgggccatggctttcatcctgtgtcccctgacctgtccaggtgagtgtgagggcagcactgggaagctggagtgctgcttgtgcctcccttcccagtgggctgtgttgactgctgctccccacccctaccgatggtcccaggaagcagggagagttggggaaggcaagattggaaagacaggaagaccaaggcctcggcagaactctctgtcttctctccacttctggtcccctgtggtgatgtgcctgtaatctttttctccacccaaaccccttcccacgacaaaaacaagactgcctccctctcttccgggagctggtgacagccttgggcctttcagtcccaaagcggccgatgggagtctccctccgactccagatatgaacagggcccaggcctggagcgtttgctgtgccaggaggcggcagctcttctgggcagagcctgtccccgccttccctcactcttcctcatcctgcttctcttttcctcgcagatgataaaaggaatctggcattctacacctggaccatttgattgttttattttggaattggtgtatatcatgaagccttgctgaactaagttttgtgtgtatatatttaaaaaaaaaatcagtgtttaaataaagacctatgtacttaatcctttaactctgcggatagcatttggtaggtagtgattaactgtgaataataaatacacaatgaattcttaaaaaaaaaaaaaa

SEQ ID NO: 66 - DNA, 3131 bp, Homo Sapiens
gtggtcagcacaggggccggcaccacggggttatcgaagcagctgtcaagatgctggggtccctggtgttgaggagaaaagcactggcgccacggctactcctccggctgctcaggtccccaacgctccggggccatggaggtgcttccggccggaatgtgactactgggagtctcggggagccgcagtggctgagggtagccaccggggggcgccctggaacatcgccggccttgttctccggacgtggggcagccaccggggggcgccagggaggacgcttcgataccaaatgcctcgcggctgccacttggggacgccttcctggtcccgaagaaacactcccaggacaggacagctggaacggggtccccagcagggccggactgggcatgtgcgccctggccgcagcgctggtggttcattgctacagcaagagtccgtccaacaaggatgcagccctgttggaagctgcccgtgccaacaatatgcaagaagtcagcaggctgttgtcagaaggtgcagatgtcaatgcaaagcacagacttggctggacagcactcatggtggcagccatcaaccgaaacaacagtgtggtacaggtcctgcttgctgctggggctgatccaaaccttggagatgatttcagcagtgtttacaagactgccaaggaacagggaatccattctttggaagatgggggacaggacggtgcaagccggcacatcacaaaccagtggacaagtgccctggagttcaggagatggctaggactccccgctggcgtcctgatcacccgagaggatgacttcaacaacaggctgaacaaccgcgccagtttcaagggctgcacggccttgcactatgctgttcttgctgatgactaccgcactgtcaaggagctgcttgatggaggagccaaccccctgcagaggaatgaaatgggacacacacccttggattatgcccgagaaggggaagtgatgaagcttctgaggacttctgaagccaagtaccaagagaagcagcggaagcgtgaggctgaggagcggcgccgcttccccctggagcagcgactaaaggagcacatcattggccaggagagcgccatcgccacagtgggtgctgcgatccggaggaaggagaatggctggtacgatgaagaacaccctctggtcttcctcttcttgggatcatctggaataggaaaaacagagctggccaagcagacagccaaatatatgcacaaagatgctaaaaagggcttcatcaggctggacatgtccgagttccaggagcgacacgaggtggccaagtttattgggtctccaccaggctacgttggccatgaggagggtggccagctgaccaagaagttgaagcagtgccccaatgctgtggtgctctttgatgaagtagacaaggcccatccagatgtgctcaccatcatgctgcagctgtttgatgagggccggctgacagatggaaaagggaagaccattgattgcaaggacgccatcttcatcatgacctccaatgtggccagcgacgagatcgcacagcacgcgctgcagctgaggcaggaagctttggagatgagccgtaaccgtattgccgaaaacctgggggatgtccagataagtgacaagatcaccatctcaaagaacttcaaggagaatgtgattcgccctatcctgaaagctcacttccggagggatgagtttctgggacggatcaatgagatcgtctacttcctccccttctgccactcggagctcatccaactcgtcaacaaggaactaaacttctgggccaagagagccaagcaaaggcacaacatcacgctgctctgggaccgcgaggtggcagatgtgctggtcgacggctacaatgtgcactatggcgcccgctccatcaaacatgaggtagaacgccgtgtggtgaaccagctggcagcagcctatgagcaggacctgctgccagggggctgtactttgcgcatcacggtggaggactcagacaagcagctactcaaaagcccagaactgccctcaccccaggctgagaagcgcctccccaagctgcgtctggagatcatcgacaaggacagcaagactcgcagactggacatccgggcaccactgcaccctgagaaggtgtgcaacaccatctagcagccacctgcctgctcctatgtgccctcaccatccaataaaggccccttggctgtggcatggcaactgacttaccttcccctcatgccgctcccatctctacccagtctcaggcctgcttacctcctcacagcccatgaagaccccttctcagccccaaaacctgaaggaggaatttcgccctactctggcccctttgttgtgggcccataacctgctaacaagccttcaggagaggagctgcctttccacccccttcaaggcaaggagggatggaggtcccttatttccttcagaatgatccccatcccccatagtcgccagactttctcatgttcccaggaagctcagaagtatggcagctaagaacacagctggctggaagaagacagggaccagactgaactgccaccctctgctagtcctcatgcaactcagtccccagaatggctccactgggagtggaggaagagctcagaggcccaggtgcagatagttctgcaatttagtctgtagcctcctcgttccctaccctaaaattctaaggggaagggacccatagaggcttgcctgtttccgctactatattatgcccagtgttcctcctcaccccacgtcctggggtcaggccagaccatgtttcgtcagccttggggactaggccagtgttgggcacctccaggaggaggcctgactggttcattaccctcccctactcagactgagcagcagtcccagataaccaagcaagctcagctctgtgggggcctccttcaaaagaccaacatcgcagacattaggaagctgtaggaagagagatcatgggtttgacctctgcccacatggccatggagtcagcctcagccctgtctgtactgctcgtccagctaaacgagcctggaataaacatgcagtttattcagtctgcatgttagtcacaaaaaaaaaaaaaaaaaa

SEQ ID NO: 67 - DNA, 2024 bp, Homo Sapiens
actgtctcggtatcaccaaacccttgcaggctcttatgggcatgaaacactcctcccgctgcctgctcctgaggaggaaaatggcggagaacgcggccgagagcaccgaggtgaacagccccccctcccagcccccccagcccgtcgtccctgctaagcccgtgcaatgcgtccatcatgtgtccactcaacccagctgcccaggacggggcaagatgtccaagctgctgaacccagaggagatgacctcgagagattattacttcgactcctatgcccactttgggatccacgaggaaatgctgaaggatgaggtgcggactctcacttaccggaactccatgtaccacaacaagcacgtgttcaaggacaaagtggtactggatgtggggagtggtactgggatcctttccatgttcgctgccaaggcaggggccaagaaggtgtttgggatcgaatgctccagtatttctgactactcacagaagatcattaaggccaaccacttggacaacatcatcaccatatttaagggtaaagtggaagaggtggagctgcctgtggagaaggtggacatcatcatcagcgagtggatgggctactgtctgttctatgagtccatgctcaacacggtgatctttgccagggacaagtggctgaaacctggagggcttatgtttccagaccgggcagctttgtacgtggtagcgattgaagacagacagtacaaggacttcaaaatccactggtgggagaatgtctatggctttgacatgacctgcatcagggacgtggccatgaaggagcctctagtggacatcgtggatccaaagcaagtggtgaccaatgcctgtttgataaaggaggtggacatttacacagtgaagacggaagagctatcgttcacatctgcattctgcctgcagatacagcgcaacgactacgtccacgccctggtcacctattttaatattgaatttaccaagtgccacaagaaaatggggttttccacagcccctgatgctccctacacccactggaagcagaccgtcttctacttggaagattacctcactgtccggaggggggaggaaatctacgggaccatatccatgaagccaaatgccaaaaatgtgcgagacctcgatttcacagtagacttggattttaagggacagctgtgtgaaacatctgtatctaatgactacaaaatgcgttagcacacgtgggaagctgcagagagcaacgagaaaaggaactctcacctcgatctgccgtgccgtcccaaagaataccgtttgcaggactacacacttgaaaaccagagttttcaactctgccttgaagattggtgaactccccagggctccagtgggctctgccactggacagaaggcctccagctcctccgctctgccctggtagcccttcacgaaggctttgtgttgccaacaaagagcgacctggcgtgctgtggctgggccccgagggtggaaacgtattcgcgtctccccgtctcctccttaactgtgactctccgggtcttctgagttttgcatgctgcgggtgtctaggacagattgcttccactagaacctggagacatagcatctttgatagcataagccagattatctgtgtgtgcggtggtgtgcgtgtgcgtgcatgtgtgaatgtgagcagcatagttgatatttacccacaaacacctgtatatgcgtgcatatacaaccaagtgggtagacctaggtgttctctcagaggggtgtgtgtgtgtgtgcgtgcgcgtgtgcctagaatatatattactctcagaggagattctgttgcttttgaataggaatttgttttgtgattagttcgccccttccccaccccttaccagatgttaagcagctatgaaacattctctgtactagttctggtctccttttgactggactgtggctctgaaccttgagcatagtaccacggactccgtgggcgctcaataaacacacatgagaacaaaaaaaaaaaaaaaa

SEQ ID NO: 68 - DNA, 4707 bp, Homo Sapiens
gcgccatggagcagtggcgacagtgcggccgctggctcatcgattgcaaggtcctgccgcccaaccaccgggtggtgtggccctcggccgtggtcttcgacctggcgcaggcgctgcgcgacggggtccttctgtgccagctgctgcacaacctctcccccggctccatcgacctcaaggacatcaacttccggccgcagatgtcccagtttctgtgtttgaagaacatacgcaccttcctgaaagtctgccacgataaatttggattaaggaacagcgagctgtttgacccctttgacctcttcgatgtgcgagactttggaaaggtcatctccgcggtgtcgaggctctccctgcacagcatcgcgcagaacaaagggatcaggccttttccctcagaggagaccacagagaatgacgatgacgtctaccgcagcctggaggagctggccgacgagcatgacctgggggaggacatctacgactgcgtcccgtgtgaggatggaggggacgacatctacgaggacatcatcaaggtggaggtgcagcagcccatgaaaatgggcatgactgaagatgacaagaggaactgctgcctgctggagatccaggagaccgaggccaagtactaccgcaccctggaggacattgagaagaactacatgagccccctgcggctggtgctgagcccggcggacatggcagctgtcttcattaacctggaggacctgatcaaggtgcatcacagcttcctgagggccatcgacgtgtccgtgatggtggggggcagcacgctggccaaggtcttcctcgatttcaaggaaaggcttctgatctacggggagtactgcagccacatggagcacgcccagaacacactgaaccagctcctggccagccgggaggacttcaggcagaaagtcgaggagtgcacactgaaggtccaggatggaaaatttaagctgcaagacctgctggtggtccccatgcagagggtgctcaaataccacctgctcttgaaggagcttctgagccattctgcggaacggcctgagaggcagcagctcaaagaagcactggaagccatgcaggacttggcgatgtacatcaatgaagttaaacgggacaaggagaccttgaggaaaatcagcgaatttcagagttctatagaaaatttgcaagtgaaactggaggaatttggaagaccaaagattgacggggaactgaaagtccggtccatagtcaaccacaccaagcaggacaggtacttgttcctgtttgacaaggtggtcatcgtctgcaagcggaagggctacagctacgagctcaaggagatcatcgagctgctgttccacaagatgaccgacgaccccatgaacaacaaggacgtcaagaagtggtcctacggcttctacctaattcaccttcaaggaaagcagggcttccagtttttctgcaaaacagaagatatgaagaggaagtggatggagcagtttgagatggccatgtcaaacatcaagccagacaaagccaatgccaaccaccacagtttccagatgtacacgtttgacaagaccaccaactgcaaagcctgcaaaatgttcctcaggggcaccttctaccagggatacatgtgtaccaagtgtggcgtcggggcacacaaggagtgcctggaagtgatacctccctgcaagttcacttctcctgcagatctggacgcctccggagcgggaccaggtcccaagatggtggccatgcagaattaccatggcaacccagcccctcccgggaagcctgtgctgaccttccagacgggcgacgtgcttgagctgctgaggggcgaccctgagtctccgtggtgggagggtcgtctggtacaaaccaggaagtcagggtatttccccagctcatctgtgaagccctgccctgtggatggaaggccgcccatcagccggccgccatcccgggagatcgactacactgcatacccctggtttgcaggtaacatggagaggcagcagacggacaacctgctcaagtcccacgccagcgggacctacctgatcagggagcggcctgccgaggctgagcgctttgcaataagcatcaagttcaatgatgaggtgaagcacatcaaggtggtggagaaggacaactggatccacatcacagaggccaagaaattcgacagcctcctggagttggtggagtactaccagtgccactcactgaaggagagcttcaagcagctggacaccacactcaagtacccctacaagtcccgggaacgttcggcctccagggcctccagccggtccccagtgttcacgccccgcgtcatcggcacagctgtggccaggtataactttgccgcccgagatatgagggagctttcgctgcgggagggtgacgtggtgaggatctacagccgcatcggcggagaccagggctggtggaagggcgagaccaacggacggattggctggtttccttcaacgtacgtagaagaggagggcatccagtgacggcaggaacgtggacaagactcgcagattttcttgggagagtcactccagccctgaagtctgtctctagctcctctgtgactcagaggggaaataccaacctcccagtcttccactgcccacagggatagggagggtgttgagaatcctaaactcgaaccgtttcactgtcagcctgccctcggcgacccatcactgggtatgctattgtacatagaggaaacctgggctagccccacccagagcgcagaggagggggcaccgacagcgctgcgagccaggctctgggtagtggctgaggccagaggcccatcgcctgcccctgtccaactgagatggccttcaggagcctaggtttgaacagcagatgctgtcccaggaagggctagggacatcggaggggacctgcccccacaccctctgctcagcccctggactcagccttgcctgtcttttcctgctgctcccagggggaggtgtcagacctcgggaggcagacgggaccagagccaggctgttcactgtgggcccacttgccccactgtgctagggcgcgggaggagagagcactgtggtcgccctctgcagccactctggctcccaagacttccctgactcccccactcccctccttgccaggggcacacccggaccccacacggcaggcccctctcttgggaggggcctttggaatgatgaaattccaaccctgctgcccggtcagcggtaccgtttcctgccctctctctgagaggccctttctggagtcctgggaaggtgtctgcctggccgcgctgccagatcagtacatcttttgtaaaaaccctgaaatgggcagggaagaaaacagggatttcccctctctagatccctgccaggtccctctccaggaggcccctctgctctcctgaagggtggtccctgagggtctgcccagccttggcacgagaggttggttccagcccctggcagggcttccttccaagggcccctgcagcctacaaactgggcctcgggcgactcaaaataagtgctcttgggggtggctctaccccattacctcccccagccacaactcctggccttcgacttctggctgggttagccagaccctggtttctctaccctgatgttgcatgagacctggtaacagtgtctccctcccagctccttgccaaagcctctgttgagacctgggcttcttgtagccccttctccctctggccagctgcacagcctgtgggaggtgcccggcccaggctgggtgtgggggaagctggtccctgctgtgggtggcgctggggacctaggggctccttctgaggttggccttgtggcctctgggctgtatgcctctggggtgtagggaagaggcgggaggagtcatggggatggggagcggcagggggagagaggggccctcgacaaaggcttgggaaatgaggggaggtggaggcagggcaggggaagcgaagagtcagccttggagagagcaccctggggcctccgtgtcggggtacacccagcactttgcgacctgcggcccagcaggcgcggaggatggcggggaggaagccagcagcccctgtgtttactgtcgtcagaaaggtcttgtgttttggttttggggtttttgttttgtttgtgttttgtttggcttgtttgttttttaaggggaaaaaagtttgtaattatttcatccaaatctcccgttatatatctgtgaataataagagattttataatagcaagaaaatgatgtatattttagtttgttgacaaataagtcatcatgatcacgaaggacactgagaaaaaataatttagaaccctggtttttgtgaatttttttgttttgtgtttctttgttttgagatttgtgtttggtttggtttttgcactgcactaaggcaggagggttggagggctgggtgcagcctgggagtccgatggttttcagcaggagacggggtgtcccctgcagggggctaaactgcaggggcctgagattagctgtgaacatgtgggagcccgatgcatgtgggtcagggatctgggggcccccccagctggcgggaaccccaaatggacacaaactgtacatttgccaatgggtttttttcagaccatggtttttacttgcaaataaacctgagttcttttctgcaaaaaaaaaaaaaaa

SEQ ID NO: 69 - DNA, 4707 bp, Homo Sapiens; identical to SEQ ID NO: 68

SEQ ID NO: 70 - DNA, 2546 bp, Homo Sapiens
gacggcaaatggcggacttcgacacctacgacgatcgggcctacagcagcttcggcggcggcagagggtcccgcggcagtgctggtggccatggttcccgtagccagaaggagttgcccacagagcccccctacacagcatacgtaggaaatctacctttcaatacggttcagggcgacatagatgctatctttaaggatctcagcataaggagtgtacggctagtcagagacaaagacacagataaatttaaaggattctgctatgtagaattcgatgaagtggattcccttaaggaagccttgacatacgatggtgcactgttgggcgatcggtcacttcgtgtggacattgcagaaggcagaaaacaagataaaggtggctttggattcagaaaaggtggaccagatgacagaggaatgggtagctctcgagaatctagaggtggatgggattcccgggatgacttcaattctggcttcagggatgacttcttagggggcaggggaggtagtcgcccaggcgaccggcgaacaggcccccccatgggcagccgcttcagagatggccctcccctccgtggatccaacatggatttcagagaacccacagaagaggaaagagcacagagaccacgactccagcttaaacctcgaacagtcgcgacgcccctcaatcaagtagccaatcccaactctgctatcttcgggggtgccaggcctagagaggaagtcgttcaaaaggagcaagaatgagcctgcggttgggagggaatggggcgtggggggttagagcaggaccacagcctggtgagtccccgggcagccgtcctgcagccgccactcctgcgcctgccattggcctcctcacagcggaaacacagcttgtgagtgcatgtcagctgttaacaagtggtttttagtacattctgggctttgctgtatctatctagtgcctgtttgtgcgtttttttctttcttccgctgcttccccattttccttctgtcctttttctcctgctccttgttttcccagcagcacatggggttcctcggaggagcagaggtggccgccgtgggggggcgtttgggctgcggtgctgcgtcatttttcctttgctttctctttactttagacactggcccaactccaggcgtttcctttcattccctcagtgcttctcttctgacctgcatgttgagttctgtattgctggggcttccaacaaaaaccagagtcactgacagagggaacagcagagaccttgttggtattcagctgtgatggatatagagaatcagaggcaccttgttttcacaactaggataaaaatatctgcagggtcctttccattcctatttagagggagtcctggctccatgaccccctcccgagtggactgtccaagcagataggctcacacgagaaacagtgaggctgaaagggggggctatggaagagcggtagggagtccacggagaagatgcagtgaatgcttgcatgcattcacacgtgtgtgtgtcccagctagttcactcctttcgccgtgcgtggtggaggctggcctctctggctgggtgcagtgaatggccagcgggtttcttttctgctgggccaaggcgctttgggggtggagggggtggtgctggtgctgcactgggctgactgcggcgctgacgcagcgtttccccccatccctgttgcctgtgtgttgtgtggatctgttcctagtataggcaacataatgagatactgtgcttcccacctccccttcagttcagagccaaaatgggtctagaatctggcactttactcatttcctttgataaattgtactatgcagagctgtcaggaaccttcagatagcagtagaggactgcagctgtctaggtctgcggccacatcttggggacacactggactgttcccatgtgcagggttcagcagttatgtgggagtgctaggggttaggcttttgagcttgaacgcctgcgtgtgaacagatgaaaaatccttcagtacccaagtcccagtctgtcctatggggagcagtttgggggcggccggcagcaggagcctgggaaagaggccctcgccaggtgatggcagggccagggtggcctggggcacccagcggaatgtgcttagtatttggtcaccagccgtcatcctgggcttttcctactgtgtcttgttacaaggcctcagcaatccacagaactctctctccttccttccacctgtcagcttctctgcttctgagataagaaccatttgtgtaacaccaacacttaacttcagaaagacatgcattatgtggtgtaatcaaacccgatgctttcagatgacctacttacatcttcaatgtggataagataaagaacaaaacacatgcatctaaactgctgggcaatccagttgacttttaaatgtaagaatggaattccaaacacttaacacattcagctatatgacagaaagtaaatctatggatatggtattttgtgaatgatcttttaaataaaagaaaaccttacgtaatattt

SEQ ID NO: 71 - DNA, 3018 bp, Homo Sapiens
cggcaaaaaggagggaatccagtctaggatcctcacaccagctacttgcaagggagaaggaaaaggccagtaaggcctgggccaggagagtcccgacaggagtgtcaggtttcaatctcagcaccagccactcagagcagggcacgatgttgggggcccgcctcaggctctgggtctgtgccttgtgcagcgtctgcagcatgagcgtcctcagagcctatcccaatgcctccccactgctcggctccagctggggtggcctgatccacctgtacacagccacagccaggaacagctaccacctgcagatccacaagaatggccatgtggatggcgcaccccatcagaccatctacagtgccctgatgatcagatcagaggatgctggctttgtggtgattacaggtgtgatgagcagaagatacctctgcatggatttcagaggcaacatttttggatcacactatttcgacccggagaactgcaggttccaacaccagacgctggaaaacgggtacgacgtctaccactctcctcagtatcacttcctggtcagtctgggccgggcgaagagagccttcctgccaggcatgaacccacccccgtactcccagttcctgtcccggaggaacgagatccccctaattcacttcaacacccccataccacggcggcacacccggagcgccgaggacgactcggagcgggaccccctgaacgtgctgaagccccgggcccggatgaccccggccccggcctcctgttcacaggagctcccgagcgccgaggacaacagcccgatggccagtgacccattaggggtggtcaggggcggtcgagtgaacacgcacgctgggggaacgggcccggaaggctgccgccccttcgccaagttcatctagggtcgctggaagggcaccctctttaacccatccctcagcaaacgcagctcttcccaaggaccaggtcccttgacgttccgaggatgggaaaggtgacaggggcatgtatggaatttgctgcttctctggggtcccttccacaggaggtcctgtgagaaccaacctttgaggcccaagtcatggggtttcaccgccttcctcactccatatagaacacctttcccaataggaaaccccaacaggtaaactagaaatttccccttcatgaaggtagagagaaggggtctctcccaacatatttctcttccttgtgcctctcctctttatcacttttaagcataaaaaaaaaaaaaaaaaaaaaaaaaaaaaaaagcagtgggttcctgagctcaagactttgaaggtgtagggaagaggaaatcggagatcccagaagcttctccactgccctatgcatttatgttagatgccccgatcccactggcatttgagtgtgcaaaccttgacattaacagctgaatggggcaagttgatgaaaacactactttcaagccttcgttcttccttgagcatctctggggaagagctgtcaaaagactggtggtaggctggtgaaaacttgacagctagacttgatgcttgctgaaatgaggcaggaatcataatagaaaactcagcctccctacagggtgagcaccttctgtctcgctgtctccctctgtgcagccacagccagagggcccagaatggccccactctgttcccaagcagttcatgatacagcctcaccttttggccccatctctggtttttgaaaatttggtctaaggaataaatagcttttacactggctcacgaaaatctgccctgctagaatttgcttttcaaaatggaaataaattccaactctcctaagaggcatttaattaaggctctacttccaggttgagtaggaatccattctgaacaaactacaaaaatgtgactgggaagggggctttgagagactgggactgctctgggttaggttttctgtggactgaaaaatcgtgtccttttctctaaatgaagtggcatcaaggactcagggggaaagaaatcaggggacatgttatagaagttatgaaaagacaaccacatggtcaggctcttgtctgtggtctctagggctctgcagcagcagtggctcttcgattagttaaaactctcctaggctgacacatctgggtctcaatccccttggaaattcttggtgcattaaatgaagccttaccccattactgcggttcttcctgtaagggggctccattttcctccctctctttaaatgaccacctaaaggacagtatattaacaagcaaagtcgattcaacaacagcttcttcccagtcacttttttttttctcactgccatcacatactaaccttatactttgatctattctttttggttatgagagaaatgttgggcaactgtttttacctgatggttttaagctgaacttgaaggactggttcctattctgaaacagtaaaactatgtataatagtatatagccatgcatggcaaatattttaatatttctgttttcatttcctgttggaaatattatcctgcataatagctattggaggctcctcagtgaaagatcccaaaaggattttggtggaaaactagttgtaatctcacaaactcaacactaccatcaggggttttctttatggcaaagccaaaatagctcctacaatttcttatatccctcgtcatgtggcagtatttatttatttatttggaagtttgcctatccttctatatttatagatatttataaaaatgtaacccctttttcctttcttctgtttaaaataaaaataaaatttatctcagcttctgttagcttatcctctttgtagtactacttaaaagcatgtcggaatataagaataaaaaggattatgggaggggaacattagggaaatccagagaaggcaaaattgaaaaaaagattttagaattttaaaattttcaaagatttcttccattcataaggagactcaatgattttaattgatctagacagaattatttaagttttatcaatattggatttctggt

SEQ ID NO: 72 - DNA, 4467 bp, Homo Sapiens
agcctggacaggctttccagatggctgcggcggtcggtcggtgaggctttcccggctgtggtttggctgcgggcggcttgggcagcccgcgggcgcctcaggtagaagaagaaaggtgccactccggcatgaagacagactcgcttagtcgccagtcacttaagctgagtgcattgtgatttccaataattgaggcagtggttctaaaagctgtctacattaatgaaaagagcaatgtggccagcttgactaagccgccagcgcacagcgcggcaggacgcgcccgggtctcagcggacttgtgcatgttagctgtgtagatttatgtgagggcttgtaaaactctggtcttgtaaactagtcttaagcgcttttaatatggagacagatgagagcccctctccgctcccgtgtgggcccgcaggagaagcggtgatggagagccgagctcgccccttccaagcgctgccccgtgagcagtctccaccacctcccctgcaaacgtccagtggtgcagaggtaatggacgttggctctggtggtgatggacagtccgaactccctgctgaggaccccttcaacttctacggagcttctcttctctccaaaggatccttctctaagggccgcctcctcatagacccgaactgtagtggccacagcccgcgcaccgcccggcacgcacctgcggtccggaagttctcccctgaccttaagttgcttaaggatgtaaagattagcgtgagctttaccgagagctgcaggagtaaggacaggaaggtgctgtacacaggagcagagcgcgacgtgcgggcggagtgcggtctgctccttagccctgtcagtggggacgtgcatgcttgtccctttggcgggagtgttggtgacggggtaggcatagggggtgagagtgctgataagaaggatgaggagaatgagctggatcaggaaaagagagtggagtatgcagtgctcgatgagttagaagattttactgacaatttggagctagatgaagaaggagcaggcgggttcacggctaaagcaatcgttcagagagacagagtggatgaagaggccttgaatttcccctacgaggatgactttgacaacgatgtggatgctctgctggaagaaggcctttgtgcccccaaaaagaggcgaacagaggaaaaatatggcggagacagcgaccatccgtccgatggagagacaagtgtgcagccgatgatgaccaagattaaaacagtgctcaaaagtcgtggccgcccacctacagagccgctgcccgacgggtggatcatgacattccataactctggagtcccggtgtacctacacagagagtctcgggtggtcacctggtccaggccatacttcttgggaacgggaagcatacggaaacacgaccctcctctgagtagcatcccttgtctgcattataagaaaatgaaggacaacgaggaacgggagcaaagcagtgacctcacccctagtggggatgtgtcccccgtcaagcccctgagccgatctgcagagctggagtttcccctggatgagcctgactctatgggtgctgacccggggcccccggacgagaaagacccactaggggctgaggcagcccctggggccctggggcaggtgaaggccaaagtcgaggtgtgcaaagatgaatccgttgatctcgaggaatttcgaagctacctggagaagcgttttgactttgagcaagttactgtgaaaaaattcaggacttgggctgagcggcggcaattcaatcgggaaatgaagcggaagcaggcggagtccgagaggcccatcttgccagccaatcagaagctcattactttatcagtgcaagatgcacccacaaagaaagagtttgttattaaccccaacgggaaatccgaggtctgcatcctgcacgagtacatgcagcgtgtcctcaaggtccgccctgtctataatttctttgaatgtgagaacccaagtgagccttttggtgcctcggtgaccattgatggtgtgacttacggatctggaactgcaagcagcaaaaaacttgcgaagaataaagctgcccgagctacactggaaatcctcatccctgactttgttaaacagacctctgaagagaagcccaaagacagtgaagaactcgagtattttaaccacatcagcatcgaggactcgcgggtctacgagctgaccagcaaggctgggctgttgtctccatatcagatcctccacgagtgccttaaaagaaaccatgggatgggtgacacgtctatcaagtttgaagtggttcctgggaaaaaccagaagagtgaatacgtcatggcgtgtggcaagcacacagtgcgcgggtggtgtaagaacaagagagttggaaagcagttagcctcacagaagatccttcagctgctgcacccacatgtcaagaactgggggtctttactgcgcatgtatggccgtgagagcagcaagatggtcaagcaggagacatcggacaagagtgtgattgagctgcagcagtatgccaagaagaacaagcccaacctgcacatcctcagcaagctccaagaggagatgaagaggctagctgaggaaagggaggagactcgaaagaagcccaagatgtccattgtggcgtccgcccagcctggcggtgagcccctgtgcaccgtggacgtgtgagggaggtggcacgggccagggcgcgggggccgccagccgcacttctgaggagaccagcagtcatgcatcgtgcaccacagtgtcaggcctccaacccacgctccttccctgtggccaacctgtgggcccggccttagggtggaggctttagtgtacagggacagccatggccacacagcacacatgtggagcagcggctctccctggaaagctccaggcctgaatggatggactcagcgactgcaccagtggcagctggtgactgtggacagtggtggaccctgcttctgtgcacctgctgcaggctctttttatgaaggctttcatgaattttagtatgtaatacgcactgacgacacatgatgcttggatgacagatgagaggggatggctgagtcctgtggctggcccgtgatgccaggtggcccatgtgcccagggcgcctgcagggctgctacagggacctggtcaggaggtgcacatggtgccctgccctcacccaccctctgtgtttccccttctttgaaaaggtagaagagaaaggaatattttaaacctttttggcttaaacagaattttagcatcagaactagctttctgggattggaggcaaaccatcaaggtggtccctctccagtctggacacgatgccagcaaggatgacgtcctgccacctcctggagttaccctggcctcctagggtccctttttctgatgaagtcttaattccctaaaagcgcctctttggacactgaggccctctctgcctttcctggcctccggcaacagtttttttacaaagattttttgcagtcgagtccatatgtccacccattgatttttaaagcttttgtgatattttagcattttgaaagactttcacagtgagagtagaaggtagatttggaatcatacattttagcaagtggacttgttgaaacaggaagcaagggccttcagtgtagcccattcttgatccagagctgttgcctgtgacagcggtttctctggatgtcaaaggcagctgcctggtgcccagcttgcttctcgactggtggcccctatgggtgggtgtgcgatggaaatgtgttcctgccggagtctgaggcaccagggtgtgctcaaaggctggccctggtggtggactggcacctgtgcagagtgccgtgtgcttgtggtgcgccatctgaagcaagagtccagcgttctgccgtgtctgtcccccaccatgccccctacaggcggtactgatggcgcttttttttttttttttctgtcaggaaaacaatgttggcctgtgggccgcccacaacatatccttccctcactacctgtgtgaccaaggttggcttctgttgaccttttaaaaaagaaaccctcaactcaaattgctataattagacacttgcttctgtcttgcctcctgtctgcagctgtgaatagtcatttgactgtgactgttgcccttagccagccagatgcgcctgtgaaccaaagcttcgtgcacatgtgttcccctaaaggttggggagcctcgctgtgtcttgctgttcccaggcaccaccacagcaggtgctgccatactcttgtggtctctgtgcgccccccccccccccacccgtctgccaagcatgggtatgaatcgtgcacacagccatgcttcaaggccggggcaggggagcctgtgctgatgccatccagggcactgggctgtgcctggaaggcgagccttgattgtctgaacacataaagcaaactgtccagaag

SEQ ID NO: 73 - DNA, 5060 bp, Homo Sapiens
acgcagagcgctgctgggctgccgggtctcccgcttcctcctcctgctccaagggcctcctgcatgagggcgcggtagagacccggacccgcgccgtgctcctgccgtttcgctgcgctccgcccgggcccggctcagccaggccccgcggtgagccatgattcgcctcggggctccccagtcgctggtgctgctgacgctgctcgtcgccgctgtccttcggtgtcagggccaggatgtccaggaggctggcagctgtgtgcaggatgggcagaggtataatgataaggatgtgtggaagccggagccctgccggatctgtgtctgtgacactgggactgtcctctgcgacgacataatctgtgaagacgtgaaagactgcctcagccctgagatccccttcggagagtgctgccccatctgcccaactgacctcgccactgccagtgggcaaccaggaccaaagggacagaaaggagaacctggagacatcaaggatattgtaggacccaaaggacctcctgggcctcagggacctgcaggggaacaaggacccagaggggatcgtggtgacaaaggtgaaaaaggtgcccctggacctcgtggcagagatggagaacctgggacccctggaaatcctggcccccctggtcctcccggcccccctggtccccctggtcttggtggaaactttgctgcccagatggctggaggatttgatgaaaaggctggtggcgcccagttgggagtaatgcaaggaccaatgggccccatgggacctcgaggacctccaggccctgcaggtgctcctgggcctcaaggatttcaaggcaatcctggtgaacctggtgaacctggtgtctctggtcccatgggtccccgtggtcctcctggtccccctggaaagcctggtgatgatggtgaagctggaaaacctggaaaagctggtgaaaggggtccgcctggtcctcagggtgctcgtggtttcccaggaaccccaggccttcctggtgtcaaaggtcacagaggttatccaggcctggacggtgctaagggagaggcgggtgctcctggtgtgaagggtgagagtggttccccgggtgagaacggatctccgggcccaatgggtcctcgtggcctgcctggtgaaagaggacggactggccctgctggcgctgcgggtgcccgaggcaacgatggtcagccaggccccgcaggtcctccgggtcctgtcggtcctgctggtggtcctggcttccctggtgctcctggagccaagggtgaagccggccccactggtgcccgtggtcctgaaggtgctcaaggtcctcgcggtgaacctggtactcctgggtcccctgggcctgctggtgcctccggtaaccctggaacagatggaattcctggagccaaaggatctgctggtgctcctggcattgctggtgctcctggcttccctgggccacggggtcctcctggccctcaaggtgcaactggtcctctgggcccgaaaggtcagacgggtgaacctggtattgctggcttcaaaggtgaacaaggccccaagggagaacctggccctgctggcccccagggagcccctggacccgctggtgaagaaggcaagagaggtgcccgtggagagcctggtggcgttgggcccatcggtccccctggagaaagaggtgctcccggaaaccgcggtttcccaggtcaagatggtctggcaggtcccaagggagcccctggagagcgagggcccagtggtcttgctggccccaagggagccaacggtgaccctggccgtcctggagaacctggccttcctggagcccggggtctcactggccgccctggtgatgctggtcctcaaggcaaagttggcccttctggagcccctggtgaagatggtcgtcctggacctccaggtcctcagggggctcgtgggcagcctggtgtcatgggtttccctggccccaaaggtgccaacggtgagcctggcaaagctggtgagaagggactgcctggtgctcctggtctgaggggtcttcctggcaaagatggtgagacaggtgctgcaggaccccctggccctgctggacctgctggtgaacgaggcgagcagggtgctcctgggccatctgggttccagggacttcctggccctcctggtcccccaggtgaaggtggaaaaccaggtgaccagggtgttcccggtgaagctggagcccctggcctcgtgggtcccaggggtgaacgaggtttcccaggtgaacgtggctctcccggtgcccagggcctccagggtccccgtggcctccccggcactcctggcactgatggtcccaaaggtgcatctggcccagcaggcccccctggcgcacagggccctccaggtcttcagggaatgcctggcgagaggggagcagctggtatcgctgggcccaaaggcgacaggggtgacgttggtgagaaaggccctgagggagcccctggaaaggatggtggacgaggcctgacaggtcccattggcccccctggcccagctggtgctaacggcgagaagggagaagttggacctcctggtcctgcaggaagtgctggtgctcgtggcgctccgggtgaacgtggagagactggcccccccggaccagcgggatttgctgggcctcctggtgctgatggccagcctggggccaagggtgagcaaggagaggccggccagaaaggcgatgctggtgcccctggtcctcagggcccctctggagcacctgggcctcagggtcctactggagtgactggtcctaaaggagcccgaggtgcccaaggccccccgggagccactggattccctggagctgctggccgcgttggacccccaggctccaatggcaaccctggaccccctggtccccctggtccttctggaaaagatggtcccaaaggtgctcgaggagacagcggcccccctggccgagctggtgaacccggcctccaaggtcctgctggaccccctggcgagaagggagagcctggagatgacggtccctctggtgccgaaggtccaccaggtccccagggtctggctggtcagagaggcatcgtcggtctgcctgggcaacgtggtgagagaggattccctggcttgcctggcccatcgggtgagcccggcaagcagggtgctcctggagcatctggagacagaggtcctcctggccccgtgggtcctcctggcctgacgggtcctgcaggtgaacccggacgagagggaagccccggtgctgatggcccccctggcagagatggcgctgctggagtcaagggtgatcgtggtgagactggtgctgtgggagctcctggagcccctgggccccctggctcccctggccccgctggtccaactggcaagcaaggagacagaggagaagctggtgcacaaggccccatgggaccctcaggaccagctggagcccggggaatccagggtcctcaaggccccagaggtgacaaaggagaggctggagagcctggcgagagaggcctgaagggacaccgtggcttcactggtctgcagggtctgcccggccctcctggtccttctggagaccaaggtgcttctggtcctgctggtccttctggccctagaggtcctcctggccccgtcggtccctctggcaaagatggtgctaatggaatccctggccccattgggcctcctggtccccgtggacgatcaggcgaaaccggtcctgctggtcctcctggaaatcctgggccccctggtcctccaggtccccctggccctggcatcgacatgtccgcctttgctggcttaggcccgagagagaagggccccgaccccctgcagtacatgcgggccgaccaggcagccggtggcctgagacagcatgacgccgaggtggatgccacactcaagtccctcaacaaccagattgagagcatccgcagccccgagggctcccgcaagaaccctgctcgcacctgcagagacctgaaactctgccaccctgagtggaagagtggagactactggattgaccccaaccaaggctgcaccttggacgccatgaaggttttctgcaacatggagactggcgagacttgcgtctaccccaatccagcaaacgttcccaagaagaactggtggagcagcaagagcaaggagaagaaacacatctggtttggagaaaccatcaatggtggcttccatttcagctatggagatgacaatctggctcccaacactgccaacgtccagatgaccttcctacgcctgctgtccacggaaggctcccagaacatcacctaccactgcaagaacagcattgcctatctggacgaagcagctggcaacctcaagaaggccctgctcatccagggctccaatgacgtggagatccgggcagagggcaatagcaggttcacgtacactgccctgaaggatggctgcacgaaacataccggtaagtggggcaagactgttatcgagtaccggtcacagaagacctcacgcctccccatcattgacattgcacccatggacataggagggcccgagcaggaattcggtgtggacatagggccggtctgcttcttgtaaaaacctgaacccagaaacaacacaatccgttgcaaacccaaaggacccaagtactttccaatctcagtcactctaggactctgcactgaatggctgacctgacctgatgtccattcatcccaccctctcacagttcggacttttctcccctctctttctaagagacctgaactgggcagactgcaaaataaaatctcggtgttctatttatttattgtcttcctgtaagaccttcgggtcaaggcagaggcaggaaactaactggtgtgagtcaaatgccccctgagtgactgcccccagcccaggccagaagacctcccttcaggtgccgggcgcaggaactgtgtgtgtcctacacaatggtgctattctgtgtcaaacacctctgtattttttaaaacatcaattgatattaaaaatgaaaagattattggaaagt

SEQ ID NO: 74 - DNA, 1744 bp, Homo Sapiens
gttagagagaagcgagctgctctgtctgaccagcagcttgggattggcggagggaagcgggccaggccctgtgaggagtcaaggttctgagcagacaggccaaccggaggacaggattccctggaggccacagaggagcaccaaggagaagatctgcctgtgggtccccattgcccagcttttgcctgcactcttgcctgctgccctgagcagagtcatcatgtcttctgagcagaagagtcagcactgcaagcctgaggaaggcgttgaggcccaagaagaggccctgggcctggtgggtgcacaggctcctactactgaggagcaggaggctgctgtctcctcctcctctcctctggtccctggcaccctggaggaagtgcctgctgctgagtcagcaggtcctccccagagtcctcagggagcctctgccttacccactaccatcagcttcacttgctggaggcaacccaatgagggttccagcagccaagaagaggaggggccaagcacctcgcctgacgcagagtccttgttccgagaagcactcagtaacaaggtggatgagttggctcattttctgctccgcaagtatcgagccaaggagctggtcacaaaggcagaaatgctggagagagtcatcaaaaattacaagcgctgctttcctgtgatcttcggcaaagcctccgagtccctgaagatgatctttggcattgacgtgaaggaagtggaccccaccagcaacacctacacccttgtcacctgcctgggcctttcctatgatggcctgctgggtaataatcagatctttcccaagacaggccttctgataatcgtcctgggcacaattgcaatggagggcgacagcgcctctgaggaggaaatctgggaggagctgggtgtgatgggggtgtatgatgggagggagcacactgtctatggggagcccaggaaactgctcacccaagattgggtgcaggaaaactacctggagtaccggcaggtacccggcagtaatcctgcgcgctatgagttcctgtggggtccaagggctctggctgaaaccagctatgtgaaagtcctggagcatgtggtcagggtcaatgcaagagttcgcattgcctacccatccctgcgtgaagcagctttgttagaggaggaagagggagtctgagcatgagttgcagccagggctgtggggaaggggcagggctgggccagtgcatctaacagccctgtgcagcagcttcccttgcctcgtgtaacatgaggcccattcttcactctgtttgaagaaaatagtcagtgttcttagtagtgggtttctattttgttggatgacttggagatttatctctgtttccttttacaattgttgaaatgttccttttaatggatggttgaattaacttcagcatccaagtttatgaatcgtagttaacgtatattgctgttaatatagtttaggagtaagagtcttgttttttattcagattgggaaatccgttctattttgtgaatttgggacataataacagcagtggagtaagtatttagaagtgtgaattcaccgtgaaataggtgagataaattaaaagatacttaattcccgccttatgcctcagtctattctgtaaaatttaaaaaatatatatgcatacctggatttccttggcttcgtgaatgtaagagaaattaaatctgaataaataattctttctgttaaaaaaaaaaaaaaaaaaaa

SEQ ID NO: 75 - DNA, 1666 bp, Homo Sapiens
gattctcgccctgagcaacggcctgacgtcggtggagggaagcaggcgcaggctccgtgaggaggcaaggttctgaggagacaggccccggagcagcactagctcctgcccacactcctacctgctgccctgaccagagtcatcatgccacttgagcagaggagtcagcactgcaagcctgaggaaggccttgaggcccaaggagaggccctgggcttggtgggtgcgcaggctcctgctactgaggagcaggagactgcctcctcctcctctactctagtggaagtcaccctgcgggaggtgcctgctgccgagtcaccaagtcctccccacagtcctcagggagcctccaccctccccactaccatcaactatactctctggagtcaatccgatgagggctccagcaacgaagaacaggaagggccaagcacctttcctgacctggagacgagcttccaagtagcactcagtaggaagatggctgagttggttcattttctgctcctcaagtatcgagccagggagccattcacaaaggcagaaatgctggggagtgtcatcagaaatttccaggacttctttcctgtgatcttcagcaaagcctccgagtacttgcagctggtctttggcatcgaggtggtggaagtggtccgcatcggccacttgtacatccttgtcacctgcctgggcctctcctacgctggcctgctgggcgacaatcagatcgtgcccaagacaggcctcctgataatcgtcctggccataatcgcaaaagagggcgactgtgcccctgaggagaaaatctgggaggagctgagtgtgttggaggcatctgatgggagggaggacagtgtctttgcgcatcccaggaagctgctcacccaagatttggtgcaggaaaactacctggagtaccggcaggtccccggcagtgatcctgcatgctacgagttcctgtggggtccaagggccctcgttgaaaccagctatgtgaaagtcctgcaccatttgctaaagatcagtggagggcctcacattccctacccacccctgcatgaatgggcttttagagagggggaagagtgagtctgagcacgagttgcagccagggccagtgggagggggtctgggccagtgcaccttccaaggccccatccattagtttccactgcctcgtgtgacatgaggcccattcttcactctttgaagagagcagtcagtattgttagtagtgagtttctgttctattggatgactttgagatttatctttgtttcctgttggaattgttcaaatgttccttttaacggatggttgaatgaacttcagcatccaagtttatgaatgacagtagtcacacatagtgctgtttatatagtttaggagtaagagtgttgttttttattcagattgggaaatccattccattttgtgaattgtgacaaataacagcagtggaaaaagtatgtgcttagaattgtgaaagaattagcagtaaaatacatgagataaagacctcaagaagttaaaagatacttaattcttgccttatacctcactctattctgtaaatttgaaaaaaaagcatggatacctggatatccttggcttctttgagaatttaagagaaattaaatctgaataaataaaaaaaaaaaaaaaa

SEQ ID NO: 76 - DNA, 4264 bp, Homo Sapiens
atttcccgccagcaggagccgcgcggtagatgcggtgcttttaggagctccgtccgacagaacggttgggccttgccggctgtcggtatgtcgcgacagagcaccctgtacagcttcttccccaagtctccggcgctgagtgatgccaacaaggcctcggccagggcctcacgcgaaggcggccgtgccgccgctgcccccggggcctctccttccccaggcggggatgcggcctggagcgaggctgggcctgggcccaggcccttggcgcgatccgcgtcaccgcccaaggcgaagaacctcaacggagggctgcggagatcggtagcgcctgctgcccccaccagttgtgacttctcaccaggagatttggtttgggccaagatggagggttacccctggtggccttgtctggtttacaaccacccctttgatggaacattcatccgcgagaaagggaaatcagtccgtgttcatgtacagttttttgatgacagcccaacaaggggctgggttagcaaaaggcttttaaagccatatacaggttcaaaatcaaaggaagcccagaagggaggtcatttttacagtgcaaagcctgaaatactgagagcaatgcaacgtgcagatgaagccttaaataaagacaagattaagaggcttgaattggcagtttgtgatgagccctcagagccagaagaggaagaagagatggaggtaggcacaacttacgtaacagataagagtgaagaagataatgaaattgagagtgaagaggaagtacagcctaagacacaaggatctaggcgaagtagccgccaaataaaaaaacgaagggtcatatcagattctgagagtgacattggtggctctgatgtggaatttaagccagacactaaggaggaaggaagcagtgatgaaataagcagtggagtgggggatagtgagagtgaaggcctgaacagccctgtcaaagttgctcgaaagcggaagagaatggtgactggaaatggctctcttaaaaggaaaagctctaggaaggaaacgccctcagccaccaaacaagcaactagcatttcatcagaaaccaagaatactttgagagctttctctgcccctcaaaattctgaatcccaagcccacgttagtggaggtggtgatgacagtagtcgccctactgtttggtatcatgaaactttagaatggcttaaggaggaaaagagaagagatgagcacaggaggaggcctgatcaccccgattttgatgcatctacactctatgtgcctgaggatttcctcaattcttgtactcctgggatgaggaagtggtggcagattaagtctcagaactttgatcttgtcatctgttacaaggtggggaaattttatgagctgtaccacatggatgctcttattggagtcagtgaactggggctggtattcatgaaaggcaactgggcccattctggctttcctgaaattgcatttggccgttattcagattccctggtgcagaagggctataaagtagcacgagtggaacagactgagactccagaaatgatggaggcacgatgtagaaagatggcacatatatccaagtatgatagagtggtgaggagggagatctgtaggatcattaccaagggtacacagacttacagtgtgctggaaggtgatccctctgagaactacagtaagtatcttcttagcctcaaagaaaaagaggaagattcttctggccatactcgtgcatatggtgtgtgctttgttgatacttcactgggaaagtttttcataggtcagttttcagatgatcgccattgttcgagatttaggactctagtggcacactatcccccagtacaagttttatttgaaaaaggaaatctctcaaaggaaactaaaacaattctaaagagttcattgtcctgttctcttcaggaaggtctgatacccggctcccagttttgggatgcatccaaaactttgagaactctccttgaggaagaatattttagggaaaagctaagtgatggcattggggtgatgttaccccaggtgcttaaaggtatgacttcagagtctgattccattgggttgacaccaggagagaaaagtgaattggccctctctgctctaggtggttgtgtcttctacctcaaaaaatgccttattgatcaggagcttttatcaatggctaattttgaagaatatattcccttggattctgacacagtcagcactacaagatctggtgctatcttcaccaaagcctatcaacgaatggtgctagatgcagtgacattaaacaacttggagatttttctgaatggaacaaatggttctactgaaggaaccctactagagagggttgatacttgccatactccttttggtaagcggctcctaaagcaatggctttgtgccccactctgtaaccattatgctattaatgatcgtctagatgccatagaagacctcatggttgtgcctgacaaaatctccgaagttgtagagcttctaaagaagcttccagatcttgagaggctactcagtaaaattcataatgttgggtctcccctgaagagtcagaaccacccagacagcagggctataatgtatgaagaaactacatacagcaagaagaagattattgattttctttctgctctggaaggattcaaagtaatgtgtaaaattatagggatcatggaagaagttgctgatggttttaagtctaaaatccttaagcaggtcatctctctgcagacaaaaaatcctgaaggtcgttttcctgatttgactgtagaattgaaccgatgggatacagcctttgaccatgaaaaggctcgaaagactggacttattactcccaaagcaggctttgactctgattatgaccaagctcttgctgacataagagaaaatgaacagagcctcctggaatacctagagaaacagcgcaacagaattggctgtaggaccatagtctattgggggattggtaggaaccgttaccagctggaaattcctgagaatttcaccactcgcaatttgccagaagaatacgagttgaaatctaccaagaagggctgtaaacgatactggaccaaaactattgaaaagaagttggctaatctcataaatgctgaagaacggagggatgtatcattgaaggactgcatgcggcgactgttctataactttgataaaaattacaaggactggcagtctgctgtagagtgtatcgcagtgttggatgttttactgtgcctggctaactatagtcgagggggtgatggtcctatgtgtcgcccagtaattctgttgccggaagataccccccccttcttagagcttaaaggatcacgccatccttgcattacgaagactttttttggagatgattttattcctaatgacattctaataggctgtgaggaagaggagcaggaaaatggcaaagcctattgtgtgcttgttactggaccaaatatggggggcaagtctacgcttatgagacaggctggcttattagctgtaatggcccagatgggttgttacgtccctgctgaagtgtgcaggctcacaccaattgatagagtgtttactagacttggtgcctcagacagaataatgtcaggtgaaagtacattttttgttgaattaagtgaaactgccagcatactcatgcatgcaacagcacattctctggtgcttgtggatgaattaggaagaggtactgcaacatttgatgggacggcaatagcaaatgcagttgttaaagaacttgctgagactataaaatgtcgtacattattttcaactcactaccattcattagtagaagattattctcaaaatgttgctgtgcgcctaggacatatggcatgcatggtagaaaatgaatgtgaagaccccagccaggagactattacgttcctctataaattcattaagggagcttgtcctaaaagctatggctttaatgcagcaaggcttgctaatctcccagaggaagttattcaaaagggacatagaaaagcaagagaatttgagaagatgaatcagtcactacgattatttcgggaagtttgcctggctagtgaaaggtcaactgtagatgctgaagctgtccataaattgctgactttgattaaggaattatagactgactacattggaagctttgagttgacttctgaccaaaggtggtaaattcagacaacattatgatctaataaactttattttttaaaaatga

SEQ ID NO: 77 - DNA, 339 bp, Homo Sapiens
  misc_feature (127)..(127): n is a, c, g, or t
  misc_feature (151)..(151): n is a, c, g, or t
  misc_feature (154)..(154): n is a, c, g, or t
  misc_feature (202)..(202): n is a, c, g, or t
  misc_feature (206)..(206): n is a, c, g, or t
  misc_feature (241)..(241): n is a, c, g, or t
  misc_feature (243)..(244): n is a, c, g, or t
  misc_feature (250)..(250): n is a, c, g, or t
  misc_feature (264)..(264): n is a, c, g, or t
  misc_feature (305)..(305): n is a, c, g, or t
  misc_feature (313)..(313): n is a, c, g, or t
  misc_feature (323)..(323): n is a, c, g, or t
ctgaaagttggtgagggacctgtggcacagtgcatcagtggttttattgctcttgacgttgctccacctcgtggacctctctggatcttgggagatgtgttcatgggcaaataccacaccgtatttnactttggtaacgaacaggtcgggnttncagaggcagcctaaacacggtcgggttggtgtcgcgtatggttttagnatgnacaatctgcgtctcaagtgttgtttgtatggtttncnngagttnaggacctttaagtncgtagtagaaattggttggccgcagttccttttaaagttgntttccctnacggaaaaanggccttttgtaggttt

SEQ ID NO: 78 - DNA, 368 bp, Homo Sapiens
gaagagacgtggtaagtgcggtgcagttttcaactgacctctggacgcagaacttcagccatgaaggtaacaggcatctttcttctcagtgccttggccctgttgagtctatctggtaacactggagctgactccctgggaagagaggccaaatgttacaatgaacttaatggatgcaccaagatatatgaccctgtctgtgggactgatggaaatacttatcccaatgaatgcgtgttatgttttgaaggtcggaaacgccagacttctatcctcattcaaaaatctgggccttgctgagaaccaaggttttgaaatcccatcaggtcaccgcgaggcctattgttgaataaatgtatctgaatatc

SEQ ID NO: 79 - DNA, 1470 bp, Homo Sapiens
gacggtcacccgttgccagctctagcctttaaattcccggctcggggacctccacgcaccgcggctagcgccgacaaccagctagcgtgcaaggcgccgcggctcagcgcgtaccggcgggtttcgaaaccgcagtcctccggcgaccccgaactccgctccggagcctcagccccctggaaagtgatcccggcatcggagagccaagatgccggcccacttgctgcaggacgatatctctagctcctataccaccaccaccaccattacagcgcctcctccaggggtcctgcagaatggaggagataagttggagacgatgcccctctacttggaagacgacattcgccctgatataaaagatgatatatatgaccccacctacaaggataaggaaggcccaagccccaaggttgaatatgtctggagaaacatcatccttatgtctctgctacacttgggagccctgtatgggatcactttgattcctacctgcaagttctacacctggctttggggggtattctactattttgtcagtgccctgggcataacagcaggagctcatcgtctgtggagccaccgctcttacaaagctcggctgcccctacggctctttctgatcattgccaacacaatggcattccagaatgatgtctatgaatgggctcgtgaccaccgtgcccaccacaagttttcagaaacacatgctgatcctcataattcccgacgtggctttttcttctctcacgtgggttggctgcttgtgcgcaaacacccagctgtcaaagagaaggggagtacgctagacttgtctgacctagaagctgagaaactggtgatgttccagaggaggtactacaaacctggcttgctgatgatgtgcttcatcctgcccacgcttgtgccctggtatttctggggtgaaacttttcaaaacagtgtgttcgttgccactttcttgcgatatgctgtggtgcttaatgccacctggctggtgaacagtgctgcccacctcttcggatatcgtccttatgacaagaacattagcccccgggagaatatcctggtttcacttggagctgtgggtgagggcttccacaactaccaccactcctttccctatgactactctgccagtgagtaccgctggcacatcaacttcaacacattcttcattgattggatggccgccctcggtctgacctatgaccggaagaaagtctccaaggccgccatcttggccaggattaaaagaaccggagatggaaactacaagagtggctgagtttggggtccctcaggttcctttttcaaaaaccagccaggcagaggttttaatgtctgtttattaactactgaataatgctaccaggatgctaaagatgatgatgttaacccattccagtacagtattcttttaaaattcaaaagtattgaaagccaaaaaaaaaaaaaaaaaaaaaaaaa

SEQ ID NO: 80 - DNA, 447 bp, Homo Sapiens
  misc_feature (20)..(20): n is a, c, g, or t
  misc_feature (81)..(81): n is a, c, g, or t
  misc_feature (86)..(86): n is a, c, g, or t
  misc_feature (104)..(104): n is a, c, g, or t
  misc_feature (136)..(136): n is a, c, g, or t
  misc_feature (150)..(150): n is a, c, g, or t
  misc_feature (154)..(154): n is a, c, g, or t
  misc_feature (167)..(167): n is a, c, g, or t
  misc_feature (248)..(248): n is a, c, g, or t
  misc_feature (306)..(306): n is a, c, g, or t
  misc_feature (323)..(323): n is a, c, g, or t
  misc_feature (325)..(325): n is a, c, g, or t
  misc_feature (327)..(327): n is a, c, g, or t
  misc_feature (368)..(368): n is a, c, g, or t
  misc_feature (378)..(378): n is a, c, g, or t
  misc_feature (423)..(423): n is a, c, g, or t
tttttccccgaagtcaagtnttaaagcatgttggatttcagaaacatgagtttattcatatcttctggactgagcaaccanctccntttgattagaagcgcttnttcacacatatttacacacccgcttctggcgnccacggcggaaccnccangagccagaaggangcttggcagttttgtgtgcttttgggtaacgcacgaccagtactggaagagatcaggggtagcctggaagaggggctcctncaggtaatcgtacacttcatttttgcctagccgatcatcttcctgagctgcggggttntcgacggcagcagaggngngnttcttggcagcgggctcgaagtcggcctcctcggccaggantccttcaccncgttgatgagctcacagaccttgccgatgatctcctcgtgctggnagggtggcacaggcgcagcttctg

SEQ ID NO: 81 - DNA, 555 bp, Homo Sapiens
  misc_feature (89)..(89): n is a, c, g, or t
  misc_feature (364)..(364): n is a, c, g, or t
  misc_feature (380)..(380): n is a, c, g, or t
  misc_feature (394)..(394): n is a, c, g, or t
  misc_feature (415)..(415): n is a, c, g, or t
  misc_feature (452)..(452): n is a, c, g, or t
  misc_feature (509)..(509): n is a, c, g, or t
  misc_feature (516)..(516): n is a, c, g, or t
gccacagactcagagagaacccaccatggtgctgtctcctgccgacaagaccaacgtcaaggccgcctggggtaaggtcggcgcgcacntggcgagtatggtgcggaggcctggagaggatgttcctgtccttccccaccaccaagacctacttcccgcacttcgacctgagccacggctctgccaggttaagggccacggcaagaaggtggccgacgcgctgaccaacgccgtgggcacgtggacgacatgcccaacgcgctgtccgccctgagcgacctgcacgcgcacaagcttcgggtggaccggtcaactttaaagctcctaaagccacttgccttgctggtgacccttggccggccancttccccgccgagttnaacccctgcggtgnacgcttccctgggacaagttnctggcttcttgtgaacaccgtgctgaacttcaaatancgttaagctggagcctcggttggcaatggttcttgccctttgggcttccccccaggncctcttncctttcttgaaccgtaaccccgtggtctttgaataaagt

SEQ ID NO: 82 - DNA, 518 bp, Homo Sapiens
  misc_feature (482)..(482): n is a, c, g, or t
actcaatagttgagtttggctgttgttgcaggaaaatgattataactaaaagctctctgatagtgcagagacttaccagaagacacaaggaattgtactgaagagctattacaatccaaatattgccgtttcataaatgtaataagtaatactaattcacagagtattgtaaatggtggatgacaaaagaaaatctgctctgtggaaagaaagaactgtctctaccagggtcaagagcatgaacgcatcaatagaaagaactcggggaaacatcccatcaacaggactacacacttgtatatacattcttggagaacactgcaatgttgaaaatccacgtttgctatttataaacttgtccttagattaatgtgtctggacagattgtgggagtaagtgattcttctaagaattagatacttgtcactgcctatacctgcagctggactgaatgggacttcgtatggttaatagttggttcnggataaatccatgccaattaaaggtaaagtgatgcc

SEQ ID NO: 83 - DNA, 2533 bp, Homo Sapiens
ggagctcaagctcctctacaaagaggtggacagagaagacagcagagaccatgggacccccctcagcccctccctgcagattgcatgtcccctggaaggaggtcctgctcacagcctcacttctaaccttctggaacccacccaccactgccaagctcactattgaatccacgccattcaatgtcgcagaggggaaggaggttcttctactcgcccacaacctgccccagaatcgtattggttacagctggtacaaaggcgaaagagtggatggcaacagtctaattgtaggatatgtaataggaactcaacaagctaccccagggcccgcatacagtggtcgagagacaatataccccaatgcatccctgctgatccagaacgtcacccagaatgacacaggattctataccctacaagtcataaagtcagatcttgtgaatgaagaagcaaccggacagttccatgtatacccggagctgcccaagccctccatctccagcaacaactccaaccccgtggaggacaaggatgctgtggccttcacctgtgaacctgaggttcagaacacaacctacctgtggtgggtaaatggtcagagcctcccggtcagtcccaggctgcagctgtccaatggcaacatgaccctcactctactcagcgtcaaaaggaacgatgcaggatcctatgaatgtgaaatacagaacccagcgagtgccaaccgcagtgacccagtcaccctgaatgtcctctatggcccagatgtccccaccatttccccctcaaaggccaattaccgtccaggggaaaatctgaacctctcctgccacgcagcctctaacccacctgcacagtactcttggtttatcaatgggacgttccagcaatccacacaagagctctttatccccaacatcactgtgaataatagcggatcctatatgtgccaagcccataactcagccactggcctcaataggaccacagtcacgatgatcacagtctctggaagtgctcctgtcctctcagctgtggccaccgtcggcatcacgattggagtgctggccagggtggctctgatatagcagccctggtgtattttcgatatttcaggaagactggcagattggaccagaccctgaattcttctagctcctccaatcccattttatcccatggaaccactaaaaacaaggtctgctctgctcctgaagccctatatgctggagatggacaactcaatgaaaatttaaagggaaaaccctcaggcctgaggtgtgtgccactcagagacttcacctaactagagacagtcaaactgcaaaccatggtgagaaattgacgacttcacactatggacagcttttcccaagatgtcaaaacaagactcctcatcatgataaggctcttacccccttttaatttgtccttgcttatgcctgcctctttcgcttggcaggatgatgctgtcattagtatttcacaagaagtagcttcagagggtaacttaacagagtgtcagatctatcttgtcaatcccaacgttttacataaaataagagatcctttagtgcacccagtgactgacattagcagcatctttaacacagccgtgtgttcaaatgtacagtggtccttttcagagttggacttctagactcacctgttctcactccctgttttaattcaacccagccatgcaatgccaaataatagaattgctccctaccagctgaacagggaggagtctgtgcagtttctgacacttgttgttgaacatggctaaatacaatgggtatcgctgagactaagttgtagaaattaacaaatgtgctgcttggttaaaatggctacactcatctgactcattctttattctattttagttggtttgtatcttgcctaaggtgcgtagtccaactcttggtattaccctcctaatagtcatactagtagtcatactccctggtgtagtgtattctctaaaagctttaaatgtctgcatgcagccagccatcaaatagtgaatggtctctctttggctggaattacaaaactcagagaaatgtgtcatcaggagaacatcataacccatgaaggataaaagccccaaatggtggtaactgataatagcactaatgctttaagatttggtcacactctcacctaggtgagcgcattgagccagtggtgctaaatgctacatactccaactgaaatgttaaggaagaagatagatccaattaaaaaaaattaaaaccaatttaaaaaaaaaaaagaacacaggagattccagtctacttgagttagcataatacagaagtcccctctactttaacttttacaaaaaagtaacctgaactaatctgatgttaaccaatgtatttatttctgtggttctgtttccttgttccaatttgacaaaacccactgttcttgtattgtattgcccagggggagctatcactgtacttgtagagtggtgctgctttaattcataaatcacaaataaaagccaattagctctataact

SEQ ID NO: 84 - DNA, 1959 bp, Homo Sapiens
ttcctccagatggtccagacctccccagaatttacccttcattcacctattaccattcaggacaaaacctctacttgtcctgctttgcggactctaacccaccggcacagtattcttggacaattaatgggaagtttcagctatcaggacaaaagctttctatcccccagattactacaaagcatagcgggctctatgcttgctctgttcgtaactcagccactggcaaggaaagctccaaatccgtgacagtcagagtctctggtaagtggatcccagcatccttggcaatagggttttaggtgcagtctatctgactttcagagaaaagtcaggaaaacatttgtattcccagcctgtgtcccatgggcacaagcaaatcccaaattttcctcctgaaccctccaaatttgtctaagaacttcgaaaactttaacaaacaggctgatatcttcataacattcccagcctagaccaagcaggaaaaacattgatttcattgaaataattgataataatgaggataatgtttttatgatttttatttgaaaatatgctgattctttatgtggatagttttctagatttatggaaatttgtcttttaatctatctctagcttatagtggttcaataaactatacttctgggaatgataattgaaatatttacttttgctctctacctgaatgccccagaattgggcaactattcatgagtattgatatgtttatggtaatacagatatttgcacaaacagagtaacaacctgctctctttgtaacaggacacatttcaaatcattggttatattaccaaggctttgactgggatgttatatttaagaatatagctagaatgaaccagtatgaactgcaggcaaactctgaagtcagccttggtttggcttcctattctcaagagttttgtaaaggtttaatctgagattccttataaaaacttacagcaaagaaaattttaaaagagagcctacatagtccattgctactcttgctgcacttatgtaaacaatcagaccaagtttgaagaaactcaacctattttgcaaacaaacttattctactgaaattatcattggtaaaactagagatgcccatagagagaaaaattatgtggaaaataaaaccgtagtacacctgttatgagattgcagctctgttcattgtttctgtgtttttattatccactgtagactggacattaccctgaattctactagttcctccaattccatcttctcccatggaacctcaaagagcaagacccactctgttccagaagccctataagtcagagttggacaactcaatgtaaatttcatgggaaaatccttgtacctgatgtctgagccactcagaactcaccaaaatgttcaacaccataacaacagctgctcaaactgtaaacaaggaaaacaagttgatgacttcacactgtggacagcttttcccaagatgtcagaataagactccccatcatgatgaggctctcacccctcttagctgtccttgcttgtgcctgcctgctttcacttggcaggataatgcagtcattagagatttcacatgtagtataggagcttctgagggtaacaacagagtgtcagatatgtcatctcaacctcagacttttacataacatctcaggaggaaatgtggctctctccatcttgcatacagggctcccaatagaaatgaacacagagatattgcctgtgtgtttgcagagaagatggtttctataaagagtaggaaagctgaaattatagtagactcccctttaaatgcacattgtgtggatggctctcaccatttcctaagagatacattgtaaaacgtgacagtaagactgattctagcagaataaaacatgtactacatttgctaatactgttctcttaaaacaattttaaaagaatggggtgggccctcccatgtgt

SEQ ID NO: 85 - DNA, 1715 bp, Homo Sapiens
cttctacttgtccacaatttgccccagaatcttcctggctacttctggtacaaaggggaaatgacggacctctaccattacattatatcgtatatagttgatggaaaaataattatatatgggcctgcatacagtggaagagaaacagtatattccaacgcatccctgctgatccagaatgtcacccggaaggatgcaggaacctacaccttacacatcataaagcgaggtgatgagactagagaagaaattcgacatttcaccttcaccttatacttggagactcccaagccctacatctccagcagcaacttaaaccccagggaggccatggaggctgtgcgcttaatctgtgatcctgagactctggacgcaagctacctatggtggatgaatggtcagagcctccctgtgactcacaggttgcagctgtccaaaaccaacaggaccctctatctatttggtgtcacaaagtatattgcaggaccctatgaatgtgaaatacggaacccagtgagtgccattcgcagtgacccagtcaccctgaatctcctccatggtccagacctccccagaatttacccttcattcacctattaccgttcaggagaaaacctcgacttgtcctgcttcacggaatctaacccaccggcagagtatttttggacaattaatgggaagtttcagcaatcaggacaaaagctctttatcccccaaattactagaaatcatagcgggctctatgcttgctctgttcataactcagccactggcaaggaaatctccaaatccatgacagtcaaagtctctggtaagtggatcccagcatccttggcagtagggttttatgtggagtctatctggctttcagagaagagtcaggaaaacatttttattcccagcctgtgtcccatgggcacaagcaaatcccaaattctcctcctgaaccctcccaatttgtctctacagactctcttctccttgtttttctgttttcttatggctgaccttgtgtctggcctgaaaaaggtagggagggggctttatcagccctgagccctatgtggtagaagaggcttcagagagggacaagaagggaattccaaggcagcgtccgcaggtcgtggtcacctgccagcgactgtctcagactgggcagggaggctttggcatgacttaagaggaagggcagtcttgggcccgctatgcaggtcctggcaaacctggctgccctgtctccatccctgtccctcagggtagcaccatggcaggactgggggaactggagtgtccttgctgtatccctgttgtgaggttccttccaggggctggcactgaagcaagggtgctgggaccccatggccttcagccctggctgagcaactgggctgtagggcagggcacttctgaggtcaggtcttggtaggtgcctgcatctgtctgccttctggctgacaatcctggaaatctgttctccagaatcaggccaaaaagttcacagtcaaatggggaggggtattcttcatgcaggagacccctaggccctggaggctgcaacatacctcaatcctgtcccaggccggatcctcctgaagcccttttcgcagcactgctatcctccaaagccattgtaaatgtgtgtacagtgtgtataaaccttcttcttctttttttttttttaaactgaggattgtcattaaacacagttgttttct

SEQ ID NO: 86 - DNA, 2974 bp, Homo Sapiens
ctcagggcagagggaggaaggacagcagaccagacagtcacagcagccttgacaaaacgttcctggaactcaagctcttctccacagaggaggacagagcagacagcagagaccatggagtctccctcggcccctccccacagatggtgcatcccctggcagaggctcctgctcacagcctcacttctaaccttctggaacccgcccaccactgccaagctcactattgaatccacgccgttcaatgtcgcagaggggaaggaggtgcttctacttgtccacaatctgccccagcatctttttggctacagctggtacaaaggtgaaagagtggatggcaaccgtcaaattataggatatgtaataggaactcaacaagctaccccagggcccgcatacagtggtcgagagataatataccccaatgcatccctgctgatccagaacatcatccagaatgacacaggattctacaccctacacgtcataaagtcagatcttgtgaatgaagaagcaactggccagttccgggtatacccggagctgcccaagccctccatctccagcaacaactccaaacccgtggaggacaaggatgctgtggccttcacctgtgaacctgagactcaggacgcaacctacctgtggtgggtaaacaatcagagcctcccggtcagtcccaggctgcagctgtccaatggcaacaggaccctcactctattcaatgtcacaagaaatgacacagcaagctacaaatgtgaaacccagaacccagtgagtgccaggcgcagtgattcagtcatcctgaatgtcctctatggcccggatgcccccaccatttcccctctaaacacatcttacagatcaggggaaaatctgaacctctcctgccacgcagcctctaacccacctgcacagtactcttggtttgtcaatgggactttccagcaatccacccaagagctctttatccccaacatcactgtgaataatagtggatcctatacgtgccaagcccataactcagacactggcctcaataggaccacagtcacgacgatcacagtctatgcagagccacccaaacccttcatcaccagcaacaactccaaccccgtggaggatgaggatgctgtagccttaacctgtgaacctgagattcagaacacaacctacctgtggtgggtaaataatcagagcctcccggtcagtcccaggctgcagctgtccaatgacaacaggaccctcactctactcagtgtcacaaggaatgatgtaggaccctatgagtgtggaatccagaacgaattaagtgttgaccacagcgacccagtcatcctgaatgtcctctatggcccagacgaccccaccatttccccctcatacacctattaccgtccaggggtgaacctcagcctctcctgccatgcagcctctaacccacctgcacagtattcttggctgattgatgggaacatccagcaacacacacaagagctctttatctccaacatcactgagaagaacagcggactctatacctgccaggccaataactcagccagtggccacagcaggactacagtcaagacaatcacagtctctgcggagctgcccaagccctccatctccagcaacaactccaaacccgtggaggacaaggatgctgtggccttcacctgtgaacctgaggctcagaacacaacctacctgtggtgggtaaatggtcagagcctcccagtcagtcccaggctgcagctgtccaatggcaacaggaccctcactctattcaatgtcacaagaaatgacgcaagagcctatgtatgtggaatccagaactcagtgagtgcaaaccgcagtgacccagtcaccctggatgtcctctatgggccggacacccccatcatttcccccccagactcgtcttacctttcgggagcgaacctcaacctctcctgccactcggcctctaacccatccccgcagtattcttggcgtatcaatgggataccgcagcaacacacacaagttctctttatcgccaaaatcacgccaaataataacgggacctatgcctgttttgtctctaacttggctactggccgcaataattccatagtcaagagcatcacagtctctgcatctggaacttctcctggtctctcagctggggccactgtcggcatcatgattggagtgctggttggggttgctctgatatagcagccctggtgtagtttcttcatttcaggaagactgacagttgttttgcttcttccttaaagcatttgcaacagctacagtctaaaattgcttctttaccaaggatatttacagaaaagactctgaccagagatcgagaccatcctagccaacatcgtgaaaccccatctctactaaaaatacaaaaatgagctgggcttggtggcgcgcacctgtagtcccagttactcgggaggctgaggcaggagaatcgcttgaacccgggaggtggagattgcagtgagcccagatcgcaccactgcactccagtctggcaacagagcaagactccatctcaaaaagaaaagaaaagaagactctgacctgtactcttgaatacaagtttctgataccactgcactgtctgagaatttccaaaactttaatgaactaactgacagcttcatgaaactgtccaccaagatcaagcagagaaaataattaatttcatgggactaaatgaactaatgaggattgctgattctttaaatgtcttgtttcccagatttcaggaaactttttttcttttaagctatccactcttacagcaatttgataaaatatacttttgtgaacaaaaattgagacatttacattttctccctatgtggtcgctccagacttgggaaactattcatgaatatttatattgtatggtaatatagttattgcacaagttcaataaaaatctgctctttgtataacagaaaaa

SEQ ID NO: 87 - DNA, 879 bp, Homo Sapiens
cattacatcatatgtagtagacggtcaaataaatatatatgggcctgcatacactggacgagaaacagtatattccaatgcatccctgctgatccagaatgtcacccgggaagacgcaggatcctataccttacacatcataaagcgaggtgataggactagaggagtaactggatatttcaccttcaacttatacctgaagctgcccaagccctacatcaccatcaacaactcaaaacccagggagaataaggatgtcttagccttcacctgtgaacctaagagtgagaactacacctacatttggtggctaaatggtcagagcctcccggtcagtcccagggtaaagcaacccattgaaaacaggatcctcattctacccagtgtcacgagaaatgaaacaggaccctatgaatgtgaaatacgggaccgagatggtggcatgcacagtgacccagtcaccctgaatgtcctctatggtccagacctccccagcatttacccttcattcacctattaccgttcaggagaaaacctctacttgtcctgcttcgcggaatctaacccaccggcagagtatttttggacaattaatgggaagtttcagcaatcaggacaaaagctctctatcccccaaattactacaaagcatagagggctctatacttgctctgttcgtaactcagccactggcaaggaaagctccaaatccatgacagtcgaagtctctgctccttcaggaataggacgtcttcctctccttaatccaatatagcagccgtgaagtcatttctgtatttcaggaagactggcagacagttgctttgattcttcctcaaatacttacaatcacctacagtccaaaattgctttttcttc

SEQ ID NO: 88 - DNA, 2043 bp, Homo Sapiens
ggacagcacagctgacagccgtactcaggaagcttctggatcctaggcttatctccacagaggagaacacacaagcagcagagaccatggggcccctctcagcccctccctgcacacacctcatcacttggaaggggctcctgctcacagcatcacttttaaacttctggaatccgcccacaactgcccaagtcacgattgaagcccagccacccaaagtttctgaggggaaggatgttcttctacttgtccacaatttgccccagaatcttgctggctacatttggtacaaagggcaaatgacatacgtctaccattacattacatcatatgtagtagacggtcaaagaattatatatgggcctgcatacagtggaagagaaagagtatattccaatgcatccctgctgatccagaatgtcacgcaggaggatgcaggatcctacaccttacacatcataaagcgacgcgatgggactggaggagtaactggacatttcaccttcaccttacacctggagactcccaagccctccatctccagcagcaacttaaatcccagggaggccatggaggctgtgatcttaacctgtgatcctgcgactccagccgcaagctaccagtggtggatgaatggtcagagcctccctatgactcacaggttgcagctgtccaaaaccaacaggaccctctttatatttggtgtcacaaagtatattgcaggaccctatgaatgtgaaatacggaacccagtgagtgccagccgcagtgacccagtcaccctgaatctcctcccaaagctgtccaagccctacatcacaatcaacaacttaaaccccagagagaataaggatgtcttaaccttcacctgtgaacctaagagtgagaactacacctacatttggtggctaaatggtcagagcctccctgtcagtcccagggtaaagcgacccattgaaaacaggatcctcattctacccaatgtcacgagaaatgaaacaggaccttatcaatgtgaaatacgggaccgatatggtggcatccgcagtgacccagtcaccctgaatgtcctctatggtccagacctccccagcatttacccttcattcacctattaccgttcaggagaaaacctctacttgtcctgcttcgccgagtctaacccacgggcacaatattcttggacaattaatgggaagtttcagctatcaggacaaaagctctctatcccccaaataactacaaagcatagtgggctctatgcttgctctgttcgtaactcagccactggcaaggaaagctccaaatccatcacagtcaaagtctctgactggatattaccctgaattctactagttcctccaattccattttctcccatggaatcacgaagagcaagacccactctgttccagaagccctataagctggaggtggacaactcgatgtaaatttcatgggaaaacccttgtacctgacatgtgagccactcagaactcaccaaaatgttcgacaccataacaacagctactcaaactgtaaaccaggataagaagttgatgacttcacactgtggacagtttttccaaagatgtcagaacaagactccccatcatgataaggctcccacccctcttaactgtccttgctcatgcctgcctctttcacttggcaggataatgcagtcattagaatttcacatgtagtagcttctgagggtaacaacagagtgtcagatatgtcatctcaacctcaaacttttacgtaacatctcaggggaaatgtggctctctccatcttgcatacagggctcccaatagaaatgaacacagagatattgcctgtgtgtttgcagagaagatggtttctataaagagtaggaaagctgaaattatagtagagtctcctttaaatgcacattgtgtggatggctctcaccatttcctaagagatacagtgtaaaacgtgacagtaatactgattctagcagaataaaacatgtaccacatttgctaaaaaaaaaaaaaaaaaaaaaaaaaaaaa

SEQ ID NO: 89 - DNA, 1216 bp, Homo Sapiens
ttttattctttctgccaggtacatcagatccatcaggtctgagctgtgttgactaccactacttttcccttcgtctcaattatgtcttggaagaagtctttgcggatccccggagaccttcgggtagcaactgtcaccttgatgctggcgatcctgagctcctcactggctgagggcagagactctcccgaggatttcgtgtaccagtttaagggcctgtgctacttcaccaacgggacggagcgcgtgcggggtgtgaccagacacatctataaccgagaggagtacgtgcgcttcgacagcgacgtgggggtgtaccgggcagtgacgccgcaggggcggcctgttgccgagtactggaacagccagaaggaagtcctggagggggcccgggcgtcggtggacagggtgtgcagacacaactacgaggtggcgtaccgcgggatcctgcagaggagagtggagcccacagtgaccatctccccatccaggacagaggccctcaaccaccacaacctgctgatctgctcggtgacagatttctatccaagccagatcaaagtccggtggtttcggaatgatcaggaggagacagccggcgttgtgtccacccccctcattaggaacggtgactggaccttccagatcctggtgatgctggaaatgactccccagcgtggagatgtctacacctgccacgtggagcaccccagcctccagagccccatcaccgtggagtggcgggctcagtctgaatctgcccagagcaagatgctgagtggcgttggaggcttcgtgctggggctgatcttccttgggcttggccttatcatccgtcaaaggagtcggaaagggcttctgcactgactcctgagactgttttaactaagactggttatcactcttctgtgatgcctgcttgtccctgcccagaattcccagctgcctgtgtcagcttgtccccctgagatcaaagtcctacagtggctgtcacgcaaccaccaggtcatctcctttcatccccaccccaaggcgctggctgtgactctgcttcctgcactgacccagagccactgcctgtacatggccagctgcgtctactcaggccccaaggggattctgtttctgttctctcctcagactgctcaagagaagcacatgaaaaacattacctgacttcagagcttttttacataattaaacatgatcctgagtt

SEQ ID NO: 90 - DNA, 31462 bp, Homo Sapiens
gatcctgactcttcttcactgccctgattgaagccgagatcctgactccagactcttcttcactgccctgaggacccggggatggggtctggggaggtggaaatgcaggggagtgggggcaaattcaaaggcctggcctaggaggcttcgtggagcagcactgaaaacccctttcacttcccccaaaccagccaaatgcagcagaggcgacacctctcctcccagccttctccctggtccagccaggatttaaaggagatttagggagaccctaaagttcacctagagcaccctgagcccatctactgtggacctgcacccagcttccgtcaaccctgccccaccacacatggatactgcccagggctgggcaaagggcagcggttcggggtgtgggtgctggccagtgccctttctgagcccgcagaagtgtgaaccactgggcaggttgaggcaatggctgcctaagtgccagtcccaggcgagtcttgagagtacacaaggattcacagctgtagcctgcatccccttttaaatagagccaccaccctctccagccaccgccagaagccagcataccccctgcaccacaggtgggagaaacacaccctcagcccacctgccgtcctcctcagctcctcctggtgccgagcccccttggcccagggtgctcccttcttcccactcatttcttcccattgtaattcccattaccaagccctttgtcctctgggcttgtgggaagatggggttctcctggcccatttatgcaagccatcttgaggggaggcagacagatgaggggctggggaaggttatgtgtgaacaggactctggggagagggagggaagggatggctcccgagagggccaggaggtggaggaaagagtaagtctcctccaactaaacaagttcagcccctttggagttcctgccacagctgggttgcttaggcaggcctgggactgtgggccacagaggtcaggggctgaaaggcactggctgtcggcccccactgggaacctgggaagcagtggttcagccctggactggatctcccccaacccaccaacatacccactcggagcccactcctgctctgtacccagctctgagctcggagctctgaggactgcggcacgcagagccaagggccctaagccggagaaggagaaaccagtactggacaatagcaggtgacagcagaggagaaaaaggggggtagggaggggacaaggaaagacctgagggggtggcagtggacaaagagattgagcaaccacagggacaaggtaaccaggaggaaacagagacaaggaaaaaagatgcaggaaatgaggaggccccagaaagacctgcagcgccgccacactttctcctcatagccaccatccattctccttccctaggccaacccagacagagctccctcaaaccagggatgcttccttttcatttatccagctcaattgaaccacacagccccagaggccaaggtaattcagcttcctctgtgatttctaggattctttcagcctttttgtttttgtttttgtttttgtgacggagtctcactctgcttgcccaggctggagtgcagtggcacaacctggcttgggccagatccctagggccattcctctggctaggaacagacttggacagcaatgaagagataactagaaacaaaggagagaaccgctgaaaaggagctatgcagagagacccagggcacctaagcaaccagagcaagagaggacgcgcaagagagtacagatcctatgagaatggtcgggggctggatgcagacagcagggttgagagagctctgagagccaagccagggagacagcaggggtgctgagggggatgggggagagaggaaaagagagggagccttgagggagaagcttgaagagctgcgggtggtgatcccgagtgaaggaaagaatcctgggtcacttgcaaatgcaaggagagtcaggaaggcgcaaggagattggagaggaggaagagcctggagcaagatgtggaggcccagggcgagagaagaggccagctcggagagggcagagctcatgttagaccctgagccgggtggagacacgggccagggagaatcggaggcaggccccactctgagatggagaagcaggcagagggaatgaaggtgagacagagacagatgcaacggggagccaggcagaagacaggcaacctgtgccagggaggccagccttgcctccttggcaccctcacctgtggccgaagcctccatccctgtccttatattccaggactcccagcagaatgaggagctgtgtgcaaggcagcttagggaggacggagagcaatatgtgagagcagggagagaaggagcctggggaagggagaggacggtacagcggcagacgggcagggctggggctgagtgaacaccttccttcctcctccttccacaggagcgggggactacccccaccacctccactccccgctgccctgccaccaccacctataccaagtgaggcctgctcagagcacagggttccctgaggacaaagcctggtctttgtcacctgaccccgacccagactgacctggcgttctcagctccttatcatgtccccagagctatgggaaccaagcagtgacgcactggccatgggctaaccccccggctcgaattctggggcctcgagtaacctagagctggggacaggtggcctgcatcccctggggtaatgatttggcataagcacctgcagaagatggggatgtggggtcaactaaggtccctccaaggacattgagaaaaggtccaaatgctctggaaagagaggtgtgttcctgagcccaggaatggggtgggcagcgtcctagggagctaggggagaggccacatcttaatggaaagtgctcctacccagagaagctgacccctgtcgtcctacccacctccacaccctggagctatattgagaggtgacagtaaactggtgggaggggggctgggagggtgttcctgggtgtgagggtggggggaaggccagagcaggggagtctggctttgtttcctgaacacaatgtccacttagtcataacaggaacagcctgctgaagacctgacacctacagcctctgagagatggcagcattggaggatggggagcggggccttgagggctagggtgcttgaggacacccacaaagaagggaatgtgagtataagccctggagggcttggaaaggggcaacaaaattctgcctggggagggggcaggtgcagagccccaccccgatggaatgcagtgcctggggaccagatggtgtaaatccccaggcctgccaggcacctgcaccctctggcagcccggtgaggcagaagggacagcccctcacccacccccctcctctctcaggccctaggattagcaccatcttcttctgcccaccccaccccaggagcagagggtagcaggggagggcaaaagcctatgtgtgcaaatgcggatgtgcaaatgtgtgcatccatgtacacaaaagaaagtagaaaagaaatctgcaagcttgagtgggtaagtgtgaaaaatctgcatgtgtggctgaagatgggcacagacacggtcaagtctgtatgtgagagtgctgaactggggttctgtgtgaaaatctgcctgaggcggcagggagaatcactgccattgcgtgagcaggttggatgttggccactctatcaggagcattagggaaggggtggggactccagacgtgtccccaaaccagggtggcctcaagaccttgggagaacacttgtctgaagacttggggaacagaaggagaccaggcatggcacttatgcagactgaggccaggacagaatttcctgacaaaagaaaactgagccatggagatggacaacagatcccttccctgggcacatactgcagcttttagtccctagcacttggggctccagtactaacagcaggaagatgctcccagccttgggactgtgtgagggatgtcagaatggaaaggagaggctggggaacaggggaggaaagcccatggttgggaggcggaggacaggcatttggcctgcaggagaaggtgaccctcacccatgttttcagtctcacttcgggggaaaaataactgaggtaagggccatggcagggtgggagaggcggtgtgagaaggtcctgtcttcccacatatctgctcatcagccctttgaaggggaggtaatgtgccctaaggactaaaaaaaggccgtggagccagagaggctggggcagcagacctttcttgggcaaatcagggggccctgctgtcctcctgtcacctccagagccaaaggatcaaaggaggaggagccaggaggggagagaggtgggagggagggtcctccggaaggactccaaatttagacagagggtgggggaaacgggatataaaggaactggagctttgaggacagatagagagactctgcggcccaggtaagaggaggtttggggtgggatgccctgcagcccgtccacagagcccccaccgtgagggacctccttcaccaggagtggggtgcaggtcagttggaggcctaagggctctattaaaactgcctatctccaggcccagggaagttccccctgacacaggaggttccacaggaaacccagaaacctcttttctccttctctgactctccatttctttctctgcatcattctgagtctcctgcatgttgtctccatctttccatcttcacttcctcctttggatggcttccttcccttgatcctggcttttatcttgcctcttggtcttcatcgacacttgtcacaatcatgcttctttgtctctctcccttgtccttccttcttggcacttgttctcacctccctgcctctctgcttctaaccctgtttccacaccccgtccctcgcactcatattgactcggtgccctttcttttctgcctctgcgtctttccctttctgactccctggtctgtcctgcctgtctgcgctctggggctgcctccatccccgggtggcctgcctctgttgttcttcactctcctcatctgttcttctctctgcccggctctacctctgttgttccttgctccacccacggtccagattcttcaggattctccgtgaagggataaccaggtgagaactgcccccattttctctgcagagactggggcatgcttctcctgggagccggattgctggaccaggggtctgctgtcccaagcactcagcgccaacccttagcatactccagccaatgccaccccagggaaaccccttacagagattgtccttcagcatcacctcagagggcaggagaagcagagccctgagtaggggagggtgcaacagcaggtgcctctcccagggtggaggagaggagcgggggtagggagggggctgcagaggacaaagccactcgctgagcctgggctccctcaggagtaacatagccctcctgtctctgacccaggggaagcaccaagatgaccgatgcccagatggctgactttggggcagcggcccagtacctccgcaagtcagagaaggagcgtctagaggcccagacccggccctttgacattcgcactgagtgcttcgtgcccgatgacaaggaagagtttgtcaaagccaagattttgtcccgggagggaggcaaggtcattgctgaaaccgagaatgggaaggtgagtagggcatggcgccggggcagaagggaaggaggtctgggaaagaagatgcagaggtggagccacttgcagggggagctgagagggctggagaaaacccaagcccagtggggatgccagcacatgctcctttgaggaccccagaatctgatccctctcaaattgacctgagctggtgcaacaggtgccacccagggccatgttccccctgccagagaggatgctgaggaagaagaaacctcagtgttcgcctaagaggggtgttgtagataaagagggcacagacacagcattaaatgatgcccccttcttgcacttgtatccctcttccctgtgcctcagtttcctccatgagtccactttctcaaattaagttcacccaaatcaagagtaattcttagacccagatgaacacaaagatcagaaacttttgagctgagcactctccttgactggcactcagaagctctggtcccctggtttgctcacaccagccaagagaatcacccctggttaccagctgcggctcagggctgtgtgcctcatgaactcgttgactgaatgttacaacccattgaagtgtagaataacaggccacaatcccctggggcttttgactctgatcccagctctgccacccgctagtcactgtgcaggcaaatcatttagtcatttagagccacggatttctccactataaaaaacactggaatacctactggcaggatctaatgacatcagggcatggcaaactgactgctgccaatcaaaccacaccaacagtgatggatggggagtgtggagtagatgggtgaactacttttccagcaggggtgaaggtttgccctgagcaacagataccctaaagcgctgcccgcgggagacagcctcggggtcagcataaggtgtgcacagatctgagagctgccaatctccaggtctgccccaagacccttggaacatagggactgaagagtgatggtcatgggcacagggtgtcccaggatgtctgggatctggcaagagaaaggatccctaggacagtctctaggatgggagatacaatgggaagggaaattacctggggaaactctcccaggggacatcggggtaggggccggggcactggtcagagcaaggggagcaaggccaagtccctgtgtcctgggaggaggtcagtgggcagtgctggcaagggtcccggaggagttgtggtcactcatcctcctgcttatgcgccccctccagacggtgactgtgaaggaggaccaggtgttgcagcagaacccacccaagttcgacaagattcaggacatggccatgctgaccttcctgcacgagcccgcggtgcttttcaacctcaaggagcgctacgcggcctggatgatatatgtgagtagctcctgcacactgcagaggcttcctgtgctgcgtggaggcctaaataagccaggggggctctcccaagaagagggggagagactcccaagggacccaagtccccttcccccctccacccctagtcagctgcaggaggagtagagccagctggagtgaacagggacatgcctggctgccaccactgcctgtcccaggctctccccaccaacctcatgcccagccttgtctcctgctccagacctactcgggcctcttctgtgtcactgtcaacccctacaagtggctgccggtgtacaatgccgaggtggtggccgcctaccggggcaagaagaggagtgaggccccgccccacatcttctccatctccgacaacgcctatcagtacatgctgacaggtgagcctggtggcccctggtctctgctcctcctcccagacacccacccagatcctcagccctgaccccattgcttctcctcttttttcttccagatcgggagaaccagtccatcctcatcacgtgagcgagtgccatcctcccacagaagggactgggctgggggcatacacgctgatgcctagggtgtagttgggaggagaggtttaaggctgggattgcagggagcatggggcactgagctctcattagaggggtgccagagcaatgaaccatgtcaggcaaatcctgctgggtgctgggctctgatggccgggctgggaaggggagcatgtgatgctgagccctgtatggagaacagtaggaatcctgagttttgattggtctctgtggcccccaggggagaatccggggcggggaagactgtgaacaccaagcgtgtcatccagtactttgccagcattgcagccataggtgaccgtggcaagaaggacaatgccaatgcgaacaaggtgccatgggggacacaggctcggcagaacaggggttggggggcaggctgacccgagttacccctaaccctcccctccctgtgacgtggtggggacagccacactgagctgggctcccgatggtcagcccagtatggaagaccttcctgacaggagacactcaccctgaggtctgggtaggatcctgtggagtcgcagacactagcggttcacccagccccgcacccccattcctcagggccagggcagcctccctgccctctcaccactgcctggaggtggatggaggatgaacccatgcagttctgctcctttcatagggcaccctggaggaccagatcatccaggccaaccccgctctggaggccttcggcaatgccaagactgtccggaacgacaactcctcccgctttgtgagtgcctttgaccactcccagtggcctcatccagccttgacaagaaaaagggggtgctgttttgccacacccagttgattgtactgtatctggctttgggatatcaacatgcacacgttggtgggaagagagcataggctttggagccaaaggtctgactttccacttgctcagcaagtccttacacctctctgagccctagttccttcacctgtgaaacaggggactaatatccaccctgcagattactgggaggattaggtgagatcatatgagaggtatgagcaggaggcattctgtatgtgttcccctctgggccgaggttccactaggaggtccctgcacagtgtgtgagggtggcatcctctgcccggcttcacttatactcaactgagacaccaaagaggttgtttacatttccagaaccatccagggcttctgggctgaacagagggccaggatttcactctgtccttcccgccagttccctcactctgtcccattcgtccccaggggaaattcattaggatccactttggggccactggaaagctggcttctgcagacatagagacctgtgagtaccagcagggaggctgccaccctctaggtccccctctgccttctctccctgcctggcggccagtctcatcattcctgccatctcctgttttgtctgcatttgcctctgggctttaggatcctttttatttaagccacatcttctcgcctggccctcttcatcaagctgtgggtgccccctgccctctgcccccatggccacctttttctggctctactctctttccttcctcacctgccttcctcccctccgcccacctcagacctgctggagaagtcccgggtgatcttccagctgaaagctgagagaaactaccacatcttctaccagattctgtccaacaagaagccggagttgctgggtgaacctgcctgccaccccccacccactgctgtccctgctgcacaccccaacgactcctgcatgcagggcagggccctcctgctccccactgtgccccaccttgctgctcacttcccttctccctccactcactccgccagctccctctcgcttccctcccaagaccacctgcgtctcctctcgcctccctgtgcagtcacacacctcactccttctccacccttctctccactcctccctcggcttgtctttgccttctcctctttatttgcctccccatctcccatgtgtcactcccctgccaccctccctcctccttgttactggagcccctgccagggcccctcttctaccctttcacttcctctgggttcactccttggtccttgctgacttctcttctctccctgctccctgtcctcccttcctccattcaccccgtcccttacccctccctgcccctccctccctttcccaactctacctgccccttccctgccctccgcctgcccccttgcccctgcctcaccccttgcctggtgcagacatgctgctggtcaccaacaatccctacgactacgccttcgtgtctcagggagaggtgtccgtggcctccattgatgactccgaggagctcatggccaccgatgtgagtgagggggctgctgcggccgttcgagggaccccaggagctcctggccaccgctccaacccccctctttgtctctcgctctgtcccagagtgcctttgacgtgctgggcttcacttcagaggagaaagctggcgtctacaagctgacgggagccatcatgcactacgggaacatgaagttcaagcagaagcagcgggaggagcaggcggagccagacggcaccgaaggtgggaggggcaggcaggcagccctgggaaggcctgaggtgctgaccaggctctctgcgggactcagatcccagagactctgaggcttgtggggcagtggggtgtgttgtgggatggtgagggacagggacgtgggagacgtgggcagacagagagtccaccacaatcccaactcctcaaccccagctgcactcaccagaactgaggtggggaattttcctcctgtgcccaagactcccccagccccaggaagcacagcccctgagctctgcacatcaccatcactaatgcagggcctttgcctgcccagcccttgggtaagcccctcgtgggctcataccatgttgtttgggaggcagtgggccaggggtcaggacatagcccagggcattggtgtgtcagtttcctcctcagtgaaatggatcaacaatctttcctcactcctctggtggctactgtgaggtcctttgagaaaatgtgaaggtgcaaacagtgctagacaggtgcccaagaacattcctccctaccttcagggacccttctccaagtctgcccagatcaaagtgtcaagctggggttcatgataacacaccaacagttattacaacattcttgaaattacaccaaataactcctcctctaaacagagaaatacccatgttgggtggcacatttggatggctgggggtaggagcgtggtactgtctgatatactctcagccagtcagattgggtaacatgtggatggagaagacagcatggccagtccagggctagacactggggtagagaacgaaggagacagggagcagaggacatctagcccctcagccacacccttgccctggagaggcgagggatatggtgaaggtggggatatgcccacagcagtgcttgtgaaagacctgacccagagatgctacagatgtagagacagagctgagaagagccagttgtggcaagaggccatgggccgataagggggctgtgctccagcctgactcagcacacgttggttgagtaaccaaggcaagcctgtgctcttccaggccttgatttcttcctctttaaggaaaagaaattggacctgatgcttcctaaagtcttggccccaggacagggaaggaggctcactccctgaaagtgttcactcaggccaggtgcagtggctcatgctgtaatccagcactttgggaggccaaggcaggttggatcacttgaggtaaggagtttgagaccagcctgggcaacatggtgaaaccctgtctctactacagatacaaaaattagcctggcatggtggctcatgtctgtagtcccagctacttgggaggctgaggcaggaaaatcacttgaacccaggaggtggaggctgtagtgagccaagatcgtgccactgcactcaagcctgggtgacagagcaagcctctatcttaaaaaaaaaaaaaggaagtgctcacttatcctttccctctcaaccagatgctgacaagtcggcctacctcatggggctgaactcagctgacctgctcaaggggctgtgccaccctcgggtgaaagtgggcaacgagtatgtcaccaaggggcagagcgtgcagcaggtgtactactccatcggggctctggccaaggcagtgtatgagaagatgttcaactggatggtgacgcgcatcaacgccaccctggagaccaagcagccacgccagtacttcataggagtcctggacatcgctggcttcgagatcttcgacgtgagttgggacccctgggagtgggagaacaatcactcgcttgctcctacattcaacagccatttgctgagagccagctgtggaccagacatgggaaggcagtggggactgtgtggtgacagaggcagtcattgtccctgtcttcaggggaagccctcctccactgccctgacatggaggggacagccataccctgctgggctcggcacagtgcacgggcacagccccaatggccactcacacccactttctgactgctcccacccctcatgccccctgcagttcaacagctttgagcagctctgcatcaacttcaccaacgagaagctgcagcagttcttcaaccaccacatgttcgtgctggagcaggaggagtacaagaaggagggcattgagtggacattcattgactttggcatggacctgcaggcctgcattgacctcatcgagaaggtgcctccttggcctcaccacctatgccccctcctctgccatccagacaaagtggtggctgagtcccttctacacccaagaaactagagtcccaagaatcccaggcctttctccaggcccagcttctccccactgtgaagtcatgggcatgaacaggatgatccccccactcttcctttcccaggaccttgcactttatgcccctttgtggtggtcccctcagtgtcttaagagtgagatgtagtgaaggagaggcccctggcccctctgaccgcccatgagaagcgtcattcatggaaagatcctaggctgaaattagagatgtttggcctcccaccaccttcctgttggttgagaaataagccagtctccagccctcttgcttatgggcattcctcagaagagacaaggccgcacgggaggccccataggccagggctgacttgctctcagtgaacctctgctctttgtcagcataggccagagcccggattgtctgacccacacccagcccagccacggccttcatgaaatgggagcttccccacatgctttgggtcattatccagattcttaaccagagttctcatgtttcagagccctcagaatgccataaaactgtgtgtggaaaaaagcatgtgtacattcatacatacatgtgtgtgcttgtgcatgtgtgtgtgtgtgcgtgtgtgtgtgtacatgcgtttttctggagagacagtctttagcttcaacaaattcttaaaaggattcctgccccaagaaaaatcaagaaccaccaggtttttggaagtgcagagtgtggtaaagaacctggatccttctatctaacccttgaagaattgctactggtgtcatacagacagagcctggcccggtgcctctgacacacatctgtccctgccctcctgcccctggggcagtgagccatcagagagaaggggctgtgctgtgaggcactgtgggccttgtggggggtgattaggagtgcatgactctttgttggacccactgggcagaaaggaggaggaaggggctttttaaattccaggaatattggcttcctgttttagggtaagaggtaccagcacagcgccccttcagcaggccagcgctactggctccagattccttttcctgtcagggtatgggactgtggaagcctgggagtgtgttcagtgattctctctttgcctcttcaccctgccctcagcccatgggcatcatgtccatcctggaggaggagtgcatgttccccaaggccactgacatgaccttcaaggccaagctgtacgacaaccacctgggcaagtccaacaatttccagaagccacgcaacatcaaggggaagcaggaagcccacttctccctgatccactacgccggcactgtggactacaacatcctgggctggctggaaaaaaacaaggatcctctcaacgagactgttgtggccctgtaccagaagtcctccctcaagctcatggccactctcttctcctcctacgcaactgccgatactggtaagcaggcagcccctgcactgggccaggggacttctgaagacacaaagggccagggtcctgctgcttcaaagcacatgactccataggcaggcacaggggagcccatgagtcaagccacctcctggctcacctcaccacagtccagctgggcttctgtagcacctgccgttctccactttgtgttatgagtgttgatatagctgtctcatgtttcctcaagatggggagtaactggaggtcagtgagggtggcacatgcatccctgtaccatgcccagcagggaacgatgcatgtgggagttctcaacaaatgttgagaggacactgaacaaaagagcctccagttcagaaaaggaagagaaaggatgtggcttgaaatgaagaggataaagtgtaagaagaaaagtagaggttgggcacggtggctcacgcctgtaatcccagcactttgggaggccgaggcgggtggatcacaaggtcaggagttcgagaccagtctggtcaacatggtgaaaccccgtctctactaaaaatacaaaaattagcctggcgtggtggcacctgcctgtagtcccagccacttgggaggctgaggcaggaaagttgcttgaatccgggcgacggaggttgcagtgagccaagattgcaccactgcactccagcatgggtgacagagtgagattccatctcaaaaatagaaggaagaagaagaagaagaagaagaagaagaagaagaagaagaagaagaagaagaagaagaagaagaagaagaggaggaggaggaggaggaggaggaggagaactagaatgtggaaagatataagaaggaagggcaagtagagggagagctaagggcactgatgtatgtcagtgcctactatgggcaagcaccagtgagctgccctacaggcgtggtcttatctaatcctctttacaactttgggaagttgttactgtcatcctcatggtaaactgaatcttggagaattccttgcccaaagtctcagagctaccaagcgagcagcagagctctgcctctgcccaagggctcctttattttccagctcctgttgattatttctcctctcgctgtttaggggacagtggtaaaagcaaaggaggcaagaaaaagggctcatccttccagacggtgtcggctctccaccgggtaagaagggcccaggggtgccaggacacctggtggaacggcccagcccagagacttctggctgcaccacctattctgatgcttgagtttgatgaggaaagaagctagggctacgtagtcgttttttagtgtgtagattccacaaaagctgaactcacgtcacaaattatgtggcagccctgtcctttgatgattctggtggagagtgtctgggacagggtttaaggcctaaaggatggtccttgtgctcctaactccccaccttcatctgcctccaggaaaatctcaacaagctaatgaccaacctgaggaccacccatcctcactttgtgcgttgcatcatccccaatgagcggaaggctccaggtgagccaggagaagaccttagtctggggaggacagctggcatccactttaccctaaggctgaccctttccccttccctcctgacacaggggtgatggacaaccccctggtcatgcaccagctgcgctgcaatggcgtgctggagggcatccgcatctgcaggaagggcttccccaaccgcatcctctacggggacttccggcagaggtgggtatgaggtgccccagagctcatagaacagggggagccaggctgccctgatgggaatgggatctgcaggtgaccctggaattctgtgggcagagcagatcactgcagagcatgggtgactctggacacttccctcctcaggtatcgcatcctgaacccagtggccatccctgagggacagttcattgatagcaggaaggggacagagaagctgctcagctctctggacattgatcacaaccagtacaagtttggccacaccaaggtgagtctagagccccattgggtggttgcagggcaggtggccatgttgagtaagacagagaggagtttaggaggcagaagcctaattctggcttccttatcaaccttatcaagggctgaaacccaggcttcattccggtcttgtttgtcaaatttttactcttacttctagaaggcatggggtgatgggtcacctgggagctcatccagggtcttccaccctggatactcccctctgaggctgcggcctgttgcatctaccccttgcctgcaggtgttcttcaaggcagggctgcttgggctgctggaggagatgcgggatgagaggctgagccgcatcatcacgcgcatgcaggcccaagcccggggccagctcatgcgcattgagttcaagaagatagtggaacgcaggtgagacaggaggaaaagggaggcatgcactagagatgtagaggcagatccgcaatgtcaactagtgtgggtcagaagacctgggttcagacctaccagctggcctgggcaagttactttaccacttcgaatctcattgcaaattcttcttcttcttcttcttcttctttttttttttttaaagaaacttctctataggaaaatgcaaattaagacaccaatgaaataccattttaaaacactagactttgcttgctcagatggtctacaaattttaaaaaatgaaagaaacaagtagataaaaataaaatgaaaggaaaaataatttttaaaagttttaaaaatcactagactgacaaaaattaagaagcctgacccactgcttacagatgtgtaaattagtgcaacttcctaggaaaacagtttatcactatcttttaaagttgaacagctgcaggccaggcgcggtggctcatgcctgaaatcccagcactttgggaggccgaggcgggtggatcacgaggtcaggagatcaaaaccatcctggctaacatggtgaaaccccatctctactaaaaaaatacaaaaaattagccggggtgtggtggcagatgcctgtagtcccagctactctggaggctgaggcaggagaatggcatgagcccgggaggcagagcttgcagtgagccgagatcgagccactgcactctagcctgggcgacagagcgagactccatctcaaaaaaaaaaagttgaacagctgcatacttctccattccactcctgagtacattcctacagagaaactcttatacatgtacaccatgacatgaaaaataatcttttagcagcattggtcataatagcaaagatcttaaaacaacttgaatttccatccacaggggaatgggtaaatagtattacagtcattcagtggaatattataaaacagtgaaaagatgtgaactccaactacatgatacaatatgtttgaacattaaagcatattgttagtaaacaaaggcaaatcttggaaggatacatacagtatgatgcaatttttataaagctcataaataatcaaaaccagccattcattgtttaaagatacatacatatggctgggcacagtggcttatgcctgtaaccccagcactttgggaggctaaggcaggcggatcacctgaggtcaggagatggagaccagcctggccaacatggtgaaaccccgtctctactaaaactacaaaaattagctgggcatggtggcaggcacctgtaattccagctactcaggagctgaggcaggagaatcgcttgaatccgggtggcagaggttgcagtgagccgagattgtgccattgcactccagcctgggcaacaagagtgaaactccatctcaaaataaataaagtaaaataaaaataaagatacattcatatgtggttaaagtaatttttgaaaaagcaaggaaaggaaaaataagattcagagtggcggctgctcctggcggggtgacaggggtgtaggaaggaacgcacaggtagatcaatggctggtaacatttcagctcctgtttcagtggtaggttcatggatagtcattttgctttcatgctgcataacttacatacttattatagacattcttatatgtaaacccctacataatttttaacatatttgaagttattatgagaatagaaaaaccaaacagagtagacattctataagtggtagtttccattaccactaatatcccagctgggaggatataaactgccctttcatcaaattgattaataaatatttatcaagcaactccatgttcagtgtagtgatgttggaggtgggtgtgcacaagaaggaagtctacgtgcctacgaacttgcttagtagggcccatgattgggaagctctcttttatagtgccccaccctgcctccacgtttccttgccagggatgccctgctggtaatccagtggaacattcgggccttcatgggggtcaagaattggccctggatgaagctctacttcaagatcaagccgctgctgaagagcgcagagacggagaaggagatggccaccatgaaggaagagttcgggcgcatcaaagagacgctggagaagtccgaggctcgccgcaaggagctggaggagaagatggtgtccctgctgcaggagaagaatgacctgcagctccaagtgcaggcggtgaggccacgtgattatctcttcagccctctcctcccctcccctagattatagcccatctcacaaccagggactgggagtctaggagtgccagctctttttaagaccctaggtctcctctctttaaccatcagcttcctccctgttctcttctcccaggaacaagacaacctcaatgatgctgaggagcgctgcgaccagctgatcaaaaacaagattcagctggaggccaaagtaaaggagatgaatgagaggctggaggatgaggaggagatgaacgcggagctcactgccaagaagcgcaagttggaagacgagtgctcagagctcaagaaggacattgatgacctggagctgacactggccaaggtggagaaggagaagcatgcaacagagaacaaggtgagggcagctccctctggcttcagcccaggtctcctcaagactcccagactagagtgttgtcctggtccttggcatggaggtccccatagatgtctccaggctggtgatctttgaccctaaaggggatgggtttttggtcggcaggtgaagaacctaacagaggagatggctgggctggatgaaatcatcgctaagctgaccaaggagaagaaagctctacaagaggcccatcagcaggccctggatgaccttcaggttgaggaagacaaggtcaacagcctgtccaagtctaaggtcaagctggagcagcaggtggatgatgtgagtagtaagaaccatgctcctgctctcagagcaagattttgcaggcaacaccaatggcccagaaagtcctgatccctagaattaacttctatggcccctgaagcttttttgctctctgtagttcctcactacagtaggtctctgaatcctttgtgcttgcaggatttctctgttggtttgacttccaatcccactggacttcaagtttagaaggaggcaaaagagcatacactatggatttcatgttttccacactttgcttattttcttccctccaacagctggagggatccctagagcaagagaagaaggtgcgcatggacctggagcgagcaaagcggaaactggagggcgacctgaagctgacccaggagagcatcatggacctggaaaatgataaactgcagctggaagaaaagcttaagaagtaggagactgtggtggccaggaggggctaatggaggtgtctggcctggtagatagagtgcagggtcgtgcgcctccactggccacagttgccttgggtatgctgggaataaggtcaatcacagccctcttccgccactttctgggctggcgaggggagggggaggtgccgattctggcatactaaggccaagaagagaatgagccccagaggaaggaaggctacctgtcactcccccacccccacccttctcctgcaggaaggagtttgacattaatcagcagaacagtaagattgaggatgagcaggcgctggcccttcaactacagaagaaactgaaggaaaaccaggtgactttttttcccagtgcatgaaagtgggagctcaatagccctgaggtaactgaggctgcagcagctgcttagggttctacacaatatctggaactccaggcagcctcatagacccaaccatccctgacttacaggcgctcaggaacactagccttcccccatagagcaagaatacattacgttagcaaaactgtttgagaaggggggactcatacctactaaagggcttctccttctgagatctgctctgcctcagggactttctactctaagacaaatgatagagctctattctcctctaacccttcctctggtagttcagccctctgaacgcagggtgaaaaaaaaaaaaggcttcaaggagcaccttcctgtgagctgctctgttcatattcttcccggtactaaccccagccactaacccaggctgagtccccatagggcactcatgataagagccaattccaacaactgtgagcaagtcacttaccctccctgatcctcagattctcttctcacctgtaaaatgagactgacaatacctaccacacaggaccagaggggataatgtatttgaaaccattttgtcaactaggaaattctatacaagtatcatattaatatagcccaatttagagaagtcagccagccactagcctaagaaggtattgttttgtcttctcaatggccttctcattcctctgcagctcaagatttagtgaacagccatagtctcccttagctttaatgaacctcaaaccctaatgtgcttttagtatcgggtttgtcagaagagacctggaagtccactgccatccccattatagagctacagaagctacatggccaggtctggacatagtgaccccaagggcaacaggaactcggctactggggcgggaccttgtcctctcactttggggcagactgtggctggtagaaagaggtagtctcccctctgcacttgaggcccatggccaggctgcaagtaatgtatgaacacaattccactcctctggggctgcacagggactggcccgccttcattagtaatttgccctcccatgttcttggatgccccttctgggttttagctagaatatcgggccatcctcaggttcttctaccctaggtctgggcaacttgtttggcctctggacacagaataacagtcctgttagtctcatcagctctcggcaataggctatggctcctccttcatccccaagatcttgctcagaagtcccaccttctccatcctgggagcagaggcatggtggtcctctctgctgcttgtaggacccatccatgaacagtccattaaagctgtccataacccgaggtgaagggatttccactgaacccccgttttgctcctggctagccagacaacagatcaaaatggtagatacgatattctcccaatttagtcaagaccaaggctaaggcccaaaaatgaggtaagggcacttaaagaggataaggagatgaggtgaagaggagagtagcctgctagcactttcctggcctggaagggagcaatcatgttgaaacccagccctgggcataaacacagcaagcctgggagagcaaggaatatggttgattggactttgtggttaacttggagaattgcaaaggtatctgattgtttcgaggcatgttgtcacaaatatttgtaaaatacaagcactcattttcccgtcttatgaatagcgcaacagagcctagtgaatctggggactctgaacttcttgatctcacaggataccaggatcccccttcaaccacaggttctcaggatttggggctgcagatgctcacactgggtctgagatgcccttgggagcttcagccaaattcctattgatggcctatgcattataggatgtttagtagcatccctggcccctaccctctagatgccagtagcaagccccaccaagacatgacaatcagacattgccaactgttccctggggcacaaaattgcccctagttgagaaccactgcttgagaggaacctaagttcctggtagcttttcagagccggggggattccagtggaggggtccaggcggtgggtctgagccctttgtgtctgacccaggcacgcatcgaggagctggaggaggagctggaggccgagcgcaccgccagggctaaggtggagaagctgcgctcagacctgtctcgggagctggaggagatcagcgagcggctggaagaggccggcggggccacgtccgtgcagatcgagatgaacaagaagcgcgaggccgagttccagaagatgcggcgggacctggaggaggccacgctgcagcacgaggccactgccgcggccctgcgcaagaagcacgccgacagcgtggccgagctgggcgagcagatcgacaacctgcagcgggtgaagcagaagctggagaaggagaagagcgagttcaagctggagctggatgacgtcacctccaacatggagcagatcatcaaggccaaggcaggctctgctcggcctcccctcgccctctcccctgcacagcggagcctcccccatgccttctctctctgtctgccatctcccttgtcattctcattctcttcatcaccctttggtctctcttcctgtctcccctgcccctctctggctctcctcaccctctctatctcttcatgttcctcctttctttaattcaagtctctcttcagactgcgccctcccacaccttctgtgtcccctcctgccctctggcattccccatctctgaccctctcttccttcctctggtcgactcagcccctcccacactcacccttcctgtcttgcttcctgaaggcaaacctggagaaagtgtctcggacgctggaggaccaggccaatgagtaccgcgtgaagctagaagaggcccaacgctccctcaatgatttcaccacccagcgagccaagctgcagaccgagaatggtgggtgcccctaaccaaccccctgcctagggcaggacatgacttgtgaaatggcccacaagcccctcatttcacctccaggagagttggcccggcagctagaggaaaaggaggcgctaatctcgcagctgacccgggggaagctctcttatacccagcaaatggaggacctcaaaaggcagctggaggaggagggcaaggtgaggcccagtggggagggtgggcaggcttgatggcagccctggggcaattcatctcagtgccagaaatggagcctggagctggaaagagtcctctgcaagggaaagaccctccagtctaggttctgccctgcagctaagcgtcatttaatgcctcttttcttattcgtaaggggatggggtgagcagactgggaaactcctcaaacagtgaggtgccacatcagcccacatggtgaataaggctgggcttggttgaagtactacataagaagagaatctagagaatggggcacagggagtccctcccacctcctggtgcccccccctccccaggcgaagaacgccctggcccatgcactgcagtcagcccggcatgactgcgacctgctgcgggagcagtacgaggaggagacagaggccaaggccgagctgcagcgcgtcctgtccaaggccaactcggaggtggcccagtggaggaccaagtatgagacggacgccattcagcggactgaggagctcgaagaggccaagtgagctccagatacccccttaacctgactctcagagaggaaggggcgagaggacctggggtggggacaggcaaagtggtcatgagacggaagtggaagagacaggaggaactcggagggcaacagaagtgcttggaagaaagcctgaactctttgctctgtgaactctggctggccctgacccacttcctgtgacgggcgagcttttggcccgggttatacctgatgctcacgtataagacgagcaaaaagcttgttggtcagaggagctaccgtcgatcagcctgtgtggggggtgagggcagggggcactgacacccagatgccactgcaggtagggaggacgcctgggcagcccgtgctggcggactctgttccaggcatgagcaggctcagctcctgctaggctggacttacggtgtctcaaggagatatagggagggggtggaaggaggtccacccaaggctccagtgttgcccagtagagtcacacacacaccctccaccctcacctgggcagaaagaagctggcccagcggctgcaggatgccgaggaggccgtggaggctgttaatgccaagtgctcctcactggagaagaccaagcaccggctacagaatgagatagaggacttgatggtggacgtagagcgctccaacgccgctgctgcagccctggacaagaagcagagaaactttgacaaggtggaccatgggtggggccgcagccagcatgcagggcaagggggcatgaggggttcagtgagaggaaaggcaactccttggaggtggaggaggagggctaagcccaggctcgggaccagggacagatcttggacatgcggctgaggctgggggctggggcactgggaagcaggagggctggggagctaaggctggggggctgaagagtgagccttgtccccgggcagatcctggccgagtggaagcagaagtatgaggagtcgcagtctgagctggagtcctcacagaaggaggctcgctccctcagcacagagctcttcaagctcaagaacgcctacgaggagtccctggagcacctagagaccttcaagcgggagaacaagaaccttcagggtgtgctgggggtccaagaggccagagatgagttggtgggagggagggccatgcaggggcagggggaacacaggctttgagctttctggccctctggtccccagaggaaatctcggaccttactgagcagctaggagaaggaggaaagaatgtgcatgagctggagaaggtccgcaaacagctggaggtggagaagctggagctgcagtcagccctggaggaggcagaggtgagggccgagaactccctgcaccccatccctgttctgccgctgtctcccacttctccctcacctggggtgaccagaccccaggacaaaatctattcattccatattctttgttcaacattatctacccactattcactacccatgactgcctccaaagccaaggtctgcacaaaggaaaatgtcagtctgattagaggccaaaggttttgtttcccaccaggttttaaaagttggaatctggccataataataaccacttagacagtgggtaggagtgtggggttccagagtcaaacaggcctgagttggaacacagcttgaggactttcactgcggcgttgggcaaaatctttaatctctctctgcctcagttttctcatctgtaaaactgtacatacctcatatgattttacacatgattattataaagattaaatgaggtaacacatttaagcacttaatatatattagctattgttactcttcatttctaagcacctggaatagccctgagttttctgggcttctaacttttctcaggaaagggtgagggacctggaaaacaagataaaattttgtatttgtggttataaaaattcctccattttctataatactttagacaggtcaggaatttatgcagtgttagtgctggagggtctggcaattgtgaggtccaaacccttttcttgacaggggaagcccagagagtccagcactttctccccaatagcaccgtggtgggcatggggtgcagatcccacctccccatctcttctcagctcttcttctctgggcgatagtcctggctgacaccgtgtatcttctcatcctccctctcaaccctgccctgtgccctgtctgcccgccctcgccccaccccttcccaggcctccctggagcacgaggagggcaagatcctccgggcccagctagagttcaaccagatcaaggcagagatcgagcggaagctggcagagaaggacgaggagatggaacaggccaagcgcaaccaccagcgggtggtggactcgctgcagacctccctggatgcagagacacgcagccgcaacgaggtcctgagggtgaagaagaagatggaaggagacctcaatgagatggagatccagctcagccacgccaaccgcatggccgccgaggcccagaagcaagtcaagagcctccagagcttgctgaaggtacatgggggcgggaggtcccctcagggactggcctccatgtgccctggagaagcagtggtgtctggatacaggcaccagattcctcctgcccctgggttactgcagggacctctgacaggtgccctcagtgaagggcacctaggctggcttctgctcacacccactctcctgatgctcaggacacccagatccagctggatgatgcggtccgtgccaacgacgacctgaaggagaacatcgccatcgtggagcggcgcaacaacctgctgcaggctgagctggaggagctgcgtgccgtggtggagcagacagagcggtcccggaagctggcggagcaggagctgattgagaccagcgagcgggtgcagctgctgcattcccaggtgagggggtcaggagccaccttgtggaaacctactgagtgcagagcccaggacatctagaaaagccagatgttctaagtgagcacatctagccagggtcacaaatcatttcctctcttaggccaactctcatctgtggtggctgcagaaccattatattaagaaagcggtctctacttagaagctaagagggtcatgattgattgctgatacctgccaaagccacaaatctgggagtagtggaatgtatcctgttatttgatattcttgatctgaaagacactccggcttgctcttgtaaagatgagagtttgggagtttaaagaagcataactgcatctcttgcaaaccaagctggctagaacaccattttctgcaatcccacccacactgttttcagttatactctgcaatgagactttgtgctcaccttttgcagtgccctgtggagttttgttctttaatctagtatgtgtgagaatgacatcatccacttacctcatcccctcttccttaccccactacattcttggtatagctataaacatctctggaatattgtcctggtaaaaagttgtttccatcttccttggaatattgtcatgctcctacgtaaacatgtgctaaagagctccagggtaatactgcagaccttttgctatttgaagtcttttttcagagtttagtaatcttagatacaatgtctagaatgtatgcactttcataggaaaagggaaagcaggtacaaaacgatcaatagtctaaaagtgggcttgttgtttaaaaaaaaaaatgaccacctttaattctctctggagaaagggtatgaaatcaggtaacaaagtgtagtatatatttgatcatttttctctctccatgtctagaacaccagcctcatcaaccagaagaagaagatggagtcggatctgacccagctccagtcggaagtggaggaggcagtgcaggagtgcagaaacgccgaggagaaggccaagaaggccatcacggatgtaagtgaccgcccaccttccgcactcgctcctaaagacagaaacaaggccttgggtccaggccaggccactgtgctgtaacaccaagccaactctgcagctgcagttctgtggatttgagggcctgatgggagaaaggagatccttggggggcaaaaggcccgcccctggcccatgtgtccttgccacctctctcctgcacacaggccgccatgatggcagaggagctgaagaaggagcaggacaccagcgcccacctggagcgcatgaagaagaacatggagcagaccattaaggacctgcagcaccggctggacgaggccgagcagatcgccctcaagggaggcaagaagcagctgcagaagctggaagcgcgggtgcgggagctggagggtgagctggaggccgagcagaagcgcaacgcagagtcggtgaagggcatgaggaagagcgagcggcgcatcaaggagctcacctaccaggtgcggcggacgcagacaccaggagtagatgtggaagtttcttctctggccccactgccccgccctcacagggctcctctcacctcctccttgagatgctgttggtagatttaacgttcttctcacgctctgcagtcagtttgacttgagtctatgagtttttccagcaaatgaagaatctacttctacttcctgaaaactcttctaactagtctttccccaggtttctttctttcttttttttttttttaataactctaagtgctaccatgaagacttcagaacagttcaaagaatccttccaccttcgactgtggggataagagtcaggggaggggaaaagacccggaaatcttccatagaacttctggcacacaaagagaaggccacagagaaagaggaccctagaatgctctaaaacctccacttgcatagctgagagctgtgcccttggcccgttattttcagtgtacctgggaagaaaaggccacaggagatgaggtgtgtacagaagtagaaatggcatcctggcacatacaatgataaagagataggaatgatcgagtgacgttggagccagtgatcccgatgcctgaattctggcccagtacaatatattagaatgtagaataatctggattatgataatacccccttctttctgcattctttttctggtcaagaactactggccaagagaacctatgtaagtccaggttggagctttatccaccatactggagctggaacagacctggtgcttttatattaccacattagggaattccattaggttctgagcccctccccctacttctagctttatgacttcagccttcattgctctgtggatccctgactgacaaccttgcattgcccctttgacctacgatagagtcagagaatcttccccaccacctctttgacctggatcattgcagggaggggcagcaaaggcaaggggagaagagtaaaatgatggaggagggaaaggtgattgcatttgctccccctccaaaccagcttctcccaccctcccacccccagacagaggaagacaaaaagaacctgctgcggctacaggacctggtggacaagctgcaactgaaggtcaaggcctacaagcgccaggccgaggaggcggtgagttcagagctttcttccctttctcatcaacacacctactatttgtgagaaccaatgaatatctcctacagaggggcctggacaaagagtttgctataaactttaactctcaaacatttgtttgacacatctgtatgctcagagctgtcaggtgttctgaattaacaaaggcaccacctacaagctgcttacaattcagataccataacccaacagaaggcagtgtagatgctagtgcaggacgtggggcagccgaagctgaaggcaggaaggtggcggtggaattgggcctagaaggggacccagctagccacagggcagtggggaagacatctgggtggatgtgagttgctgattagcatgcctgcacaggaagctggggtccgggacaggtgcagcaaaacaggattctgaaggggcccagatcgggcagcatgggatttgtctggggcagtggatggccgtgaaggactctgagtgctggacatgtttgagaagagtgcaaggcagttgcaggatacccttgggaaggctgttgcaggaatatgcatgaggcatgggtgcctcagggacagggagctggaacctcaggttgaagaggctgagaatcccatagcccatctccagctcattcacccatccccactgtcccaccacaggaggagcaagccaacaccaacctgtccaagttccgcaaggtgcagcatgagctggatgaggcagaggagcgggcggacatcgctgagtcccaggtcaacaagcttcgagccaagagccgtgacattggtgccaaggtgggtccctcccctgggcttcactagtcacttccacattagcatgccccctgatatgggtgcccttcagagtggcactgcttgccctatatgtaggcagttctgagggtcccatagcttacataacctgagaatccactctcctgctcaaaacagccccccactgactggaacttctgcagagatccccagttccatccccctaaaccacaagtgcctctaacgtgggaccacaagatccctggggccctgcctctccctccaagggcatctcccttaggccccagaaagccccagggatttgtccccacacacttctccctcttgccagctgccccctcacacctcttattctttttgcagcaaaaaatgcacgatgaggagtgacactgcctcgggaacctcactcttgccaacctgtaataaatatgagtgccaaactctgcctgagcccatctgtccttcctgccagctgtccatcctggatcagggcagtagggggcctgagaggagggaggcccccagcccctgtatcagagctgccagagccaaggcatcccatatccacaaggaaggagaccgagtgcagaggagtgaggtgttctgcctgacgtggacagctgtgagtcccagttctgctcagtcaaccacacaagggtggagagggagaaatttcaaaagtgaagaaaacaatggcatcaaaatggtgagccagtccaagatgctacgagacagaattttggtgccgaagttgaagccactctccacctaccccacccctgaggctgcaatgattaaaggtgtcctaggacacccattctttctgaaatgaattttccaccaatgccagaaaaggctcagagctggctgagaattaaggtatgggaaaggagatgggagagattccattctagtcagcccctaggaagtaactcccagggagccccctccctgtcttccccaggggtctccccctgcctcctatgattcagcacctcaccgtgagggcatcttgagactctggggccaatcaacactgagcccaaaccaatatgccatgaggaccaagcctgggcattgctcatttcatgttggttctcacacagacacagatggcacaggtgcctgtacagggaaacactgtggtcacatttctgctctctctaagctcctactggggacagtctggcctggatcacacagctgcttgtgggacaggcccggtcctgaccccgttctgcacaaagcaaatcccca

SEQ ID NO: 91 - DNA, 419 bp, Homo Sapiens
ttttttttttttttcaaagctagctgaggttttattttggaccaaaaaaaaaaagcaattgaattgttttgtagctggaggcatgggcaaggggggtccccaggtagtaaactccccaggtgggctgagggctagggctgagcctcaggtgggtctcctgttcccagtgctaccctgcatagcggcctccttcccaggctctggggcagcccaggaggggtaggctggtaggggctgccgcacctgttcacttgggcaggacgtaagaggactcagaccccagcttcccatctcgtgtcttgaccttcttcacaaccacggccctgaaggaactggcgctggttaaggagcttgaacccctcccaaaactcaaagctgtagccaaagccttaaccttggcccgggctttctaggccccc

SEQ ID NO: 92 - DNA, 397 bp, Homo Sapiens
  misc_feature (344)..(344): n is a, c, g, or t
ttttttttttgtgatcgctcagcagaatagatttattatttgtattgcttgcagaataaagcctatccttgaaagctctgaatcatgggcaagaggctcagtggtatctggaggacagggcactggccactgcagtcaccatcttctgccaggaagcctgcacctcaggggtgaattctttgccgaaatggattgccaaaacggtcaccagcacatttcccaggagcttgaagttctcaggatccacatgcagcttgtcacagtgcagttcactcagctgggaaaggtgccttggagatatccaggtgctttatggtatcttcaagggaagtcagaccttttgncatgtgcctgattttgggggtgcccatgatggcgaggcgagacaaggtgccaa

SEQ ID NO: 93 - DNA, 700 bp, Homo Sapiens
  misc_feature (452)..(452): n is a, c, g, or t
  misc_feature (584)..(584): n is a, c, g, or t
  misc_feature (633)..(633): n is a, c, g, or t
  misc_feature (656)..(656): n is a, c, g, or t
  misc_feature (660)..(660): n is a, c, g, or t
  misc_feature (676)..(676): n is a, c, g, or t
  misc_feature (680)..(681): n is a, c, g, or t
  misc_feature (689)..(689): n is a, c, g, or t
  misc_feature (691)..(691): n is a, c, g, or t
  misc_feature (694)..(695): n is a, c, g, or t
  misc_feature (700)..(700): n is a, c, g, or t
ggttgagcacagggtactttattgatggtacatgacaaggtgcggctccctaggcccctcccctcttcaaggggtctacatggcaactgtgaggaggggagattcagtgtggtgggggactgagtgtggcagggactccccagcagtgagggtctctctcttcctcttgtgctcttgcttggggctggtggtccaggggtcttactccttggaggccatgtgggccatgaggtccaccaccctgttgctgtagccaaattcgttgtcataccaggaaatgagcttgacaaagtggtcgttgagggcaatgccagccccagcgtcaaaggtggaggagtgggtgtcgctggtgaagtcagaggagaccacctggtgctcagtgtagcccaggatgcccttgaaggggccctccgacccctgcttcaccaccttcttgatgtcatcatatttgnccaggtatactagacggcaggtcaagtcccacactgacacagtggcagtggtgacacagaaagccatgccagtgagcttccaagtcagctagggatgaccggacgcgaggtcgacaatatcccggaaatgcngaccggtacagccttgctattgtgcaaactgatcatagatcacttatangcctaatgaacacatgtcctgtntganatgtaacccaccgcangcannctaagacnanganngatcn

SEQ ID NO: 94 - DNA, 519 bp, Homo Sapiens
tttttttttttttttttttttttttttttttttttggttgagcacagggtactttattgatggtacatgacaaggtgcggctccctaggcccctcccctcttcaaggggtctacatggaaactgtgaggaggggagattcagtgtggtgggggactgagtgtggcagggactccccagcagtgagggtctctctcttcctcttgtgctcttgctggggctggtggtccaagggtcttactccttggaggccatgtgggcattgaggtccaccaccctgttgctgtagccaaattcgttgtcataccaggaaatgagcttgacaaagtggtcgttgagggcaatgcagccccagcgtcgaaagtggaggaatgggtgtcgctcttgaagtcagaggagaccacctggtgctcaatttagcccaggatgccctttaaggggccctccgaaggcctgtttaccacctttctggagtccacaattttggaaggttttctaacaggaagttcggtccacactga

SEQ ID NO: 95 - DNA, 506 bp, Homo Sapiens
cacttaattttccttgataacaaaccctatgtaagtggcccaagttgaaccctaattccgtggaccgggaccttgagtgttgggctcttcgaggtggtccatggaatcccgataaggagacctggtggatacaagtctccttcccgaggttcggggtcaagtaactgtaagtctttgaaatgggatccaaagtggcctttgcgaagtttcccaaggtggcagtgcagccccgggctgagagtgtagcagtcatcgatacccgccatcatgagcagcttctttggcacaggtgcggagacgatgccagtgcccctcggtgcagggatgaggcgtatcagcacagagccgcagtggcctgtcaccttgcaagggacagtgtggggcttgcgaatcttgttctcccagtagcctctgcgcacggggacgatggagagctttgccacgatgattggcccacggatagcggtggcacctcctaatggcactttattaccagaccgacgtgg

SEQ ID NO: 96 - DNA, 648 bp, Homo Sapiens
tttaaagtacaaattcagtttattcatctgtttatgacacagtacacaggaggcaaagtgtttcacatcatagacttcacttccaactccttggaatgttcatttctttggcttacaggagagactagacaggaaggccaggcaatgcttaggcaactaaaatgaggttgggggtatgctaacgtccccctaacagggatggccacggggactgtttttcccaacttggttttttaaaccggtaacttggaaccttgggaaccaccttttttggcccctaaggcggggtggggcttaaattattttccaccaaaaaggtccagagcgctttcttggtagtcgcctttagggtttggttggatttaatagtccagggactggccggccttcttttggattccaaacttattttcaaccttgtcactctactggcggagaacattaatttgattaaggccttatctctcgtgcccttgcccttcatggagatatataggccctacaacaaaaacacggggcttgttctgaatgcactgtgacagggtcaagggaaactttttcaggtgtccttttaaccttttctgatgcgtttcacatgtgttaatggggtgtgcacttgtgcccatataaaactctttgggggggggg

SEQ ID NO: 97 - DNA, 550 bp, Homo Sapiens
  misc_feature (9)..(9): n is a, c, g, or t
  misc_feature (362)..(362): n is a, c, g, or t
  misc_feature (413)..(413): n is a, c, g, or t
  misc_feature (468)..(468): n is a, c, g, or t
  misc_feature (485)..(485): n is a, c, g, or t
  misc_feature (507)..(507): n is a, c, g, or t
  misc_feature (531)..(531): n is a, c, g, or t
tagcaccgncacaaatagcactttttatttccactatttgaagtctgaactttaaacagattcttgactggtggtcatatccatcagctcgtcaacttagacctgtctcgtcccagtggcttttcagaactactgccttaccatgaagctccatgagtttccaattcaaacttgggcttcttcagcatttttacttttctaacgagacatcatggagaggataaatagattggcaagccttttctatgtcttttccaatgctgtctggaatcaatttattgaccacttctttcaagtcatttgtctgcacctctcgggcatgatttccatcatcttcttccggattggcgggacctgttggngctgagcataagagggcttccgtatctgattgttgcgttttttaggtaaanccaacacaggacagacggaggcaagtaaccatcgggaggtcttgacaacaacggnaggcttcaatcaatggnctgccatttttttgaccatggnccacattttgtcacggggtaggancctggccatggaggttggt

SEQ ID NO: 98 - DNA, 557 bp, Homo Sapiens
cgaatagcactttttatttgccactgtttgaagtctgaactttaaacagattcttggactggtggttcatatccatcagctcgttcaactttagcgcctgtctcgtccccagtggcttttccagaactactgccttcaccatgaagttccgtgagctttccccaattcagagcttgggcttctttcagcatttttacttttccaacgaagacatcatggagaggataaatagattggcaagccttttctatgtcttttccaatgctgtctggaatcaatttattgaccacttctttcaagtcattggtctgcacctctcgggtcatgatttccagtcatctgtcttccggatttggcggacctgttggtgttgagcatgaagaggtcttccgtatctgatggtgtgccgttctttgtaaaacgcgacacagaccagcgcgatgcaagtagcctcggtagtcgtgaaatgcacgtcagcttgagtcactgtctgcctgttgtgtaccaggaacgtattttgtcgcgtgtatgattccttccagtgcggttagtcaggc

SEQ ID NO: 99 - DNA, 409 bp, Homo Sapiens
  misc_feature (88)..(88): n is a, c, g, or t
  misc_feature (191)..(191): n is a, c, g, or t
tttttttttttgccgcccactcagactttattcaaagaccaggaagggccggtgcaaggaggggaggagggcccgttgggaggcccancgggcaggaggaacggctaccgaggctccagcttaacggtatttggaggtcagcacggtgctcacagaagccaggaacttgtccagggaggcgtgcaccgcangggtgaactcggcggggaggtgggcggccagggtcaccagcaggcagtggcttaggagcttgaagttgaccgggtccacccgaagcttgtgcgcgtgcaggtcgctcagggcggacagcgcgttgggcatgtcgttcacgtgcgcacggcgttggtcaggcttggtgtgggggaaaggcaggaccatccttccaggcctccgcccatactcgccagcg

SEQ ID NO: 100 - DNA, 525 bp, Homo Sapiens
aaatcaataggtcttttattgcatcatttaaatatcacaagtaggtcttaagtgtcatctggcatcttctttctgtagccaggtaactcttagatcttattcatcagcctgctgaacagttcctttttcagagacatagataccatccaaaaatttcctgatatccttgtttttaactgttgtggcttgctgaatcaaagccgctgaatttgaaacaagctcaatgtcatttccttcaaggattaatgcatctttctgggcttgagatactgaacaagcaacacctggtctcatccgaaccctggcggatgtgtttttcacccgagaaatttcggatttcaacgagaggcccattctcctggataacaactgttgataggggaatgggcttacccggacctcatcttggtaacggaagcccaggtgagaacccttagtcagggtccggaaatggcctaaaatgttccagagggagccagtcccttcggtaccccacctttgttaaccggggcccctttttttctt

SEQ ID NO: 101 - DNA, 441 bp, Homo Sapiens
tttttttttgtggttttttccaaatcaatagggcttttattgcatcatttaaatatcacaagtaggtcttaagggtcatctggcatcttctttctgtagccaggtaactcttagatcttattcatcagcctgctgaacagttcctttttcagagacataaataccatccaaaaatttcctgatatccttgtttttaactgtgggggcttgctgaatcaaagccgctgaatttgaaacaagctcaatgtcatttccttcaaggattaattcatctttctgggcttgagatactgaacaagcaacacctgggctcatccgaaccctgcggatgtatttttcacccaagaaatttcggatttcaacaggagaccccttcctctggataacacacgtgtgggggagaggagcctacgagacctcattttgaacgggggcccagtg

SEQ ID NO: 102 - DNA, 175 bp, Homo Sapiens
agggggacaccttcttctgcatggggggccaggaggccgtgccgctggcctggacacgggaagaccatggaccgttaggcgggtgaacccacccatgtcaatgtgactgcagacatggcggagggggacggtacctgctactgagccgcccggctgttcccgacccatggataaa

SEQ ID NO: 103 - DNA, 602 bp, Homo Sapiens
ttttttttttttttttttttttttaagggttcaatgttcagtttcctttaatgacccccatctccctgaagggcaggtgcaggcagctaggtgatggcaagaaatgttcacttgaaaatcttgccctgattgaaggctttgcccacatgctggaaggccccctcccaggaaaagtactctcgaaccagcgtctgggtctcctcgctgccaggatccagtttccgccatgtgtatgactcgtagtccacctgccaatctggactcagcggaaaggcaagctcctggcctcggaagacccagactccagaaatggagctgctattgttggttccaaaaaggatgacactggcgaaggcattcttcctcagcttgtccagtcgctggaacattccagtgatgagattgcagctcatgaaggtctgagtgagttcttcagggaagcgatactctgagtaccacagggacagccgtccttatcaaagtgctcccagaaatattggagtgccacaaagagggtgtccccattggagtacttgcgctttaatccatccaacacaagagtactcttgggcaagagaacaaaggggtccttggcctatggg

SEQ ID NO: 104 - DNA, 801 bp, Homo Sapiens
  misc_feature (254)..(256): n is a, c, g, or t
  misc_feature (259)..(260): n is a, c, g, or t
  misc_feature (266)..(266): n is a, c, g, or t
  misc_feature (271)..(271): n is a, c, g, or t
  misc_feature (274)..(274): n is a, c, g, or t
  misc_feature (276)..(276): n is a, c, g, or t
  misc_feature (280)..(280): n is a, c, g, or t
  misc_feature (283)..(284): n is a, c, g, or t
  misc_feature (287)..(287): n is a, c, g, or t
  misc_feature (378)..(378): n is a, c, g, or t
  misc_feature (786)..(786): n is a, c, g, or t
ttttaaaaagttatttatttattcttttttttttttttttttttttggtaaggttgaatgcacttttggtttttggtcatgttcggttggtcaaagataaaaactaagtttgagagatgaatgcaaaggaaaaaaatattttccaaagtccatgtgaaattgtctcccattttttggcttttgagggggttcagtttgggttgcttgtctgtttccgggttggggggaaagttggttgggtgggagggagccannntgnnatgganggagnttncngggngcnnacngggcccacgtcgaagccgaattcctggtctggggcaccaacgtccaagggggccacatcgatgatgggcaggcgggaggtcttggtggttntgtattcaatcactgtcttgccccaggctcccgtgtgacttgtgcagccatcgacagggacgctgtaggtgaagccggtggtgccctcggcgccgatctcgatcttcgttgagccctggagggagagggcctcctttgaggtgcagtctgctggtccatgtaggcccacgctgtcttgcagggggtaggtgatgtctggaggggcttggtggaatcaggcgccagaggtcagttgatgggcacatggcagggtcgagccctggccgcatactcgactggaatcatcgtcatgctctcgccaccagactggctttggcctttggtttctgctgatgaccagttttcgggccacctggctgagtggtacccccggttaacagcttcatgtgcaaaaactttaggcatcantcccccttgttggcc

SEQ ID NO: 105 - DNA, 427 bp, Homo Sapiens
  misc_feature (13)..(13): n is a, c, g, or t
  misc_feature (21)..(21): n is a, c, g, or t
  misc_feature (24)..(24): n is a, c, g, or t
  misc_feature (50)..(50): n is a, c, g, or t
  misc_feature (57)..(57): n is a, c, g, or t
  misc_feature (79)..(79): n is a, c, g, or t
  misc_feature (92)..(92): n is a, c, g, or t
  misc_feature (95)..(95): n is a, c, g, or t
  misc_feature (109)..(109): n is a, c, g, or t
  misc_feature (114)..(114): n is a, c, g, or t
  misc_feature (117)..(117): n is a, c, g, or t
  misc_feature (406)..(406): n is a, c, g, or t
tttttttttttcntcccttgnacnataaatttttattggcaggtcagganaagagcngggggtaagggtcccttccttnccatccctctacncanaagacaccctccanagganagnagaagccccagagcctgctgcctcagaggaccttggaggcagacaaattgttgtagtgatcttcctgtccctcgagcaggctgcggttaggtggcaatctcctgctccagccgcgacttgatgtccatgagccgctggtactcctgattctgccgctcactatcagctcgcacatcgcccagctgggttcaataccgctgatcagcgcctggatatgcgccagtgggctccaaagcgcgcctccgtttctgccagtgtgtcttccaaggcagctttcatgctcagctgntgactgcagctcaatctcaag

SEQ ID NO: 106 - DNA, 3596 bp, Homo Sapiens
gaatgggcctgaatggcgcttcaaccgattgcggctgaatccagaagtgctgtcgcccaacgctgtgcagaggttcctcccgatggtggatgcagtggccagggacttctcccaggccctgaagaagaaggtgctgcagaacgcccgggggagcctgaccctggacgtccagcccagcatcttccactacaccatagaaggtgtgggccacatgggaagatccagcctcagagaccctggagtggccagggacggggatgggggactgaagggagtgtggggaggcagccaggaggcccggggctgccttgtgctcagcagtgcatcctccccgcagccagcaacttggctctttttggagagcggctgggcctggttggccacagccccagttctgccagcctgaacttcctccatgccctggaggtcatgttcaaatccaccgtccagctcatgttcatgcccaggagcctgtctcgctggaccagccccaaggtgtggaaggagcactttgaggcctgggactgcatcttccagtacggtgaggccagggacccgggcagtgctatggggaagggacaccatgggggcccaatttctccctctccaccacccagtgggaatggaggccacagggaggggtcggggattcctcaccgtactgccagggagattggtgtgaggctggggctgggctgggctgatccggagaatttgggatgagagcagggagacttgggtgtcggggcaggctgggcaggaggaggacactgaaggatgtttcccagcaccaaagtctgagggctgcctcccgctccccggataggcgacaactgtatccagaaaatctatcaggaactggccttcagccgccctcaacagtacaccagcatcgtggcggagctcctgttgaatgcggaactgtcgccagatgccatcaaggccaactctatggaactcactgcagggagcgtggacacggtcaggccggcaaccagccccacccagagagggtgatgccaagcctgcctcccaggcactgcctgccaatgtcacacggcgcccacgtgtcccatcccaggctatgggccccacatttcttacttgggattgtgatgtgataaacacgtttacaggttgccatggttggaatggggggttcctttctgtggaggactcagggaaaggggtttggatgggcattaggatttgaagtcttgggctctgtcgtgctcagggtatgcatgtctgcacccctcacagggaggttgtcctgggaggggtgtcccgggggctgagtcctcctgtgcaaggtctgaccctgcagctgtgtctcctgcagacggtgtttcccttgctgatgaacgctctttgagctggctcggaaccccaacgtgcagcaggccctgcgccaggagagcctggccgccgcagccagcatcagtgaacatccccagaaggcaaccaccgagctccccttgctgcgtgcggccctcaaggagaccttgcggtgggtgctggctgaggcctccctgtggccctggccccctgctggagagcagcccccactgggtggtggcagacagaatctggggctgataaacagcgtcacccagcagcccattcccctgcacctgctcttcctcccccgcaaggacagggagctcttcttcctctggaatccctcttcaacgccctggggattaacgtgggggcatgtccttctgcgcttggggctgcttaagttaggggaggtttggccgggctcagcaggtgcaaggaagcacttcctacgacctgggcttcccatggatctgggacctctgcggggtcttgggtaggaagggtgcagagagcacaggaagccccatccagctgaggaccctttctatggatgcccccacctccaggctctaccctgtgggtctgtttctggagcgagtgggagctcagacttggtgcttcagaactaccacatcccagctggggtgagtgagccccacacccctcgagctgagaacctccctccccagtcattccctgatccccgctctgcaccgtccgcagacattggtgcgcgtgttcctctactctctgggtcgcaaccccgccttgttcccgaggcctgagcgctataacccccagcgctggctagacatcaggggctccggcaggaacttctaccacgtgccctttggctttggcatgcgccagtgccttgggcggcgcctggcagaggcagagatgctgctgctgctgcaccatgtgagcaggcccgggctggggaggggcctgggcggggtctgggcagcatgggcggggcttgagcaatgtgggactggcctcggcagagtgggagtggcctgcatgtttcctggactgggcagagcgggtactgggagaacctgggccaggttgaggctgtgtaggtcctgggcaggagttggtatggtgaggagcgtaccatctgggtgaggttgctgctaaaccgggtcaggtgggaactggggaagtcgggtggagcctgtacaggatagtggggcttgggcaatacctgggctggatgaattctgggcctgggctgtaaggtggggctggtcaggaatgaaacaggttggaggccaggctgctgttcccccttcagcataatctctgcaactttgagggtctgagaaggctgcaccacgtcgatgggctgcggaccaagccagatggaaacccggcttctgtcctaggtgctgaaacacctccaggtggagacactaacccaagaggacataaagatggtctacagcttcatattgaggcccagcatgttccccctcctcaccttcagagccatcaactaatcacgtctctgcacccagggtcccagcctggccaccagcctccctttctgcctgaccccaggccacccctcttctctcccacatgcacagcttcctgagtcacccctctgtctaaccagccccagcacaaatggaactcccgagggcctctaggaccagggtttgtgcagctaagcagcaatgccaggcacagctgggaagatcttgctgaccttgtcccagccccacctggccctttctccagcaagcactgtcctctggcagtttgcccccatccctcccagtgctggctccaggctcctcgtgtggccatgcaagggtgctgtggttttgtccctgccttcctgcctagtctcacatgtccctgttcctcttcccctggccagggcccctgcgcagactgtcagagtcattaagcgggatcccagcatctcagagtccagtcaagttccctcctgcagcctgccccctaggcagctcgagcatgccctgagctctctgaaagttgtcgccctggaatagggtcttgcagggtagaataaaaggcccctgtggtcacttgtcctgacatccccattttcaagtgatacaactgagtctcgagggacgtgtgttccccagctgatcgtgtcagcctcatgccccaggcctcatctttcatggaccaggccttgttccaggagtgggcgttgggtcctctgcttcctgtgctgtcccctggggaaggtcccaaggatgctgtcagga

SEQ ID NO: 107 - DNA, 144 bp, Homo Sapiens
aaaatcggggatttcggcttcagcaatgaattcacctttgggaacaagctggacaccttctgtggcagtcccccttatgctgccccagaactcttccagggcaaaaaatatgatggacccgaggtggacgtctggtcctgtggt

SEQ ID NO: 108 - DNA, 219 bp, Homo Sapiens
atccacactggagagaagcctcacaaatgtaatgagtgtggaaaaagtttctgccgtctctctcacctaatccaacaccaaaggacccacagtggtgagaaaccctatgagtgtgaggagtgtgggaaaagcttcagccggagctctcatctagctcagcaccagaggacccacacgggtgagaaaccttatgaatgtaacgaatgtggccgaggcttc

SEQ ID NO: 109 - DNA, 712 bp, Homo Sapiens
ggcccacatgctccaagaggatatctcaagctcctataccaccaccaccaccattacagcgcctcctccaggggtcctgcagaatggaggagataagttggagacgatgcccctctacttggaagacgacattcgccctgatataaaagatgatatatacgaccccacctacaaggataaggaaggcccaagccccaaggttgaatatgtctggagaaacatcatccttatgtctctgctacacttgggagccctgtatgggatcactttgattcctacctgcaagttctacacctggctttggggggtattctactattttgtcagtgccctgggcataacagcaggagctcatcgtctgtggagccaccgctcttacaaagctcggctgcccctacggctctttctgatcattgccaacacaatggcattccagaatgatgtctatgaatgggctcgtgaccaccgtgcccaccacaagttttcagaaacacatgctgatcctcataattcccgacgtggctttttcttctctcacgtgggttggctgcttgtgcgcaaacacccagctgtcaaagagaaggggagtacgctagacttgtctgacctagaagctgagaaactggtgatgttccagaggaggtactacaaacccggcttgctgatgatgtgcttcatcctgcccacgcttgtgccctggtactgctggggc

SEQ ID NO: 110 - DNA, 424 bp, Homo Sapiens
ggatcgatcccgctagagggaaaccgttgtggtctccctatagtgagtcgtattaatttcgcgggatcgatcctctacgccggacgcatcgtggcccgatcacccggccacaggtgcggttgctgcgccgtatatcgccgacatcaccgatggggaagatcgggctcgcacttcgggctcatgagcgcttgtttcggcgtgggtatggtggcaggccccgtggcggggactgttgggcgccatctccttgcatgcaccattccttgcggcggcggtgctcaacggcctcaacctactactgggctgcttcctaatgcaggagtcgcataagggagagcgtcgaatggtgcactctcagtacaatctgctctgatgccgcatagttaagccagccccgacacccgccaacacccgctgacgccct

SEQ ID NO: 111 - DNA, 648 bp, Homo Sapiens
ctgccagatgtggggtgtgtcagtgtcactgtccctgccatgctgagccatttcatatccaacgacagaagcattccctataaggcctgcctctccgagctcttcttcttccacctcctggctggggcagactgcttcttgctgaccatcatggcctatgaccgctatctggccatctgccagtccctcacctacagcagccgcatgagctggggaatccagcaagccctggtgggcatgtcatgtgtcttttccttcaccaatgcactgacccaaactgttggcctgtctcctcttaacttctgtgggcccaatgtgatcaatcacttctactgtgacctcccacaggtcttccagctctcctgctccagcacccaactcaatgagctgctgctctttgctgtgggtttcatcatggcaggcacacctttggttctcatcatcactgcctacagccacgtggcagctgcagttctacgaatccgttcagtggagggccgaaagaaggccttctccacgtgtggctcccacctcaccgtggtttgtcttttctttggaagaggtatcttcaactacatgagactgggttcagaggaggcttcagacaaggataaaggggttggagttttcaacactgttatcaaccct

SEQ ID NO: 112 - DNA, 609 bp, Homo Sapiens
gggcagctctctaggccctagggagatgctccacagacccaggctgccctttgggaagtggggaagccaagtgggtcaggtgtgcaccacccaggggcggggccaggcagccggctgtggtgggaggcagttgagccctggattgtgactgcttcagggcagttggtagatgcccctctgggagagatccccaggggtgacagccatggaccctggaagggcctgggctagggacagggaccagagccagtccagggagaggacagagccaatggactggggtgtactgtaacagccctgctggcgagagggaccagggcaccgtcctccagggagcccatgctgcaagtcgggccagaggtgcccctgaacctgaaggccaatgagacccaagacaggccaagtgggttgtgagacccctgaggagctgggccctggtcccaggcagcgctggcccctgctgctgctgggtctggccatggtcgcccatggcctgctgcgcccaatggttgcaccgcaaagcggggacccagaccctggagcctcagttggaagcagccgatccagcctgcggagcctgtggggcaggtaaggggcaagagattccag

SEQ ID NO: 113 - DNA, 1363 bp, Homo Sapiens
gaattcagtaagctaaaatccaaagtaagcctctgatgataattggctcttattttatccatacggtcccaaagaacatctgctgtctttggcgcagggccatatatttgtggtttcaggtgcccctaaagtgtctataggagcctataaacaaagcctataaactgtgttgtaggaaagacagcacatattgttacaggctcatacaaagaaaatatatgtagtgtttcagtctagttcttaccttcctaagtagagtccttacacatgtgtaagggagataggtattgagaaagggagagtgggaatgtgaagtgatgcataacatgcaacttagtaggaattttgacctgtgttgggcacagcttgacaagcttgtgtgtgtgtatcaccacataccctcacttcccccttccctacctctttctccttactgacttcaagggagagcatataaatgacatcaaggggtatgaaaagccacttaactgcagacttgtaggcagcaactcaccctcaagaggaagtcttcaggctctagaaacatctttaacttcggcttctgcaccataagcctcagactcaatgccaccctgcagctgtgccagatcactttgtgccctgcaggtgctgctgttgactgttctgggttcctccaccaatggacaaactaagagaaacatagggaaaaggaaatgtagagatctgttccttgcacctgttgctgcttctgctatacctgtatctgggagaaagactggcttggtgctcctggggctggagagtgccattataacaacaaatccaagtggaggggtcacagagagggggcacttcacatttgctgggcattctgctgggcactttactaaagctttacagatcatattcacaatggctttatgagagaggtacaattaccttcaatttacaattgagagaactgagaaaaatattcacgaccactaatagatcactttttaccccagctgtaagtgtagacagtgacttgtacactgaactgcgctgcgtgtatgtgaagtcaacctttgtacttcatcccagaaacatccacaatttggagttggtctcagcaggaccccattgcagcaaagacgaagtaatgtaagccactgcttctgtcgtatcgcctcatcagggaagccctctacctccatccccatctgcattcatttcctccagtctcacagatcctttctgatattcaggccaggacacccacagataattctattctctcttgcagagccactctgtaagatgggagaaaaaatctgcctggacccagatgctcccagaatcaataaaattgtacagaaaatgttgaaagttgatgaattcc

SEQ ID NO: 114 - DNA, 1741 bp, Homo Sapiens
gaattcaatagaatggaatggtatcagctcgagtggaatggaatggaatggaatggaatggcatggaatcgtataaagtggaatggaatcaactcgagtggaatggaatggaatggaatggaatggaatgcagtacaatgcaatagaatggaatggaatgaactcgagttgactggaatggaatggaatggaatgcatttgaattgaatggacctgaagagaatggaatggaatggaatggaatgaagtggcctcgaatgcaatagattagattgcaacggaatcatcttgagtggaatggagtgaaatggaacggaatggaatggaatggaatggaatagaatggaatggaatggaatggaatagaatggaatggaatggaatggaatgaaatgcaatagaatggaatggtatcaactccagtggaatggaatggaatgcaatggaatggaatggaatggaatggaatggaatcaattcacctggaacggaatggaatgcaatggaatggaatggaatggaatgcagtggaatggaatggaatagaatggaatggaatggaatggaatggaatccacttgagtggaatggaatggaatggaatggattcgaacggaatggaatggaatgcaatggaatggaatgcatgtgattgaatggacacgaaaagaattgaatggaaatgaatggaatcgaatgaagtggcctcgaatgcaatataatggaatggaatcaagtcgagtggaatggaatggaatgggttggaatggaatggaatggaatggaatgcattagaatggaatggaatcaactcgagtggaatggaatggaatggaatggaatggaatggaatgcaatggaatggaatggaatggaatggaatggaatggaatggaatgcaatggaatggaatggaatgcaatagaatggaatggaatcacctcgactggaatggaatggaatggaatgcatttgaattgaatggacccgaagagaatggaatggaatggaatggaaggagtggcctcaaatgcaatagaatgcaatggaatcatctcgagtggaatggagtgaaatggaatggaatggaatggaatggaatgctatagaatgaaatggaatgaagtcaagtggaatggaatggaatggaatgggttggaagggaatgaaatggaatgcaatagaatggaaaggaatggaatggaatgaactggccaatgcaatagaattgaatggaatcaactggagtggaatggaatggaatggaatggattggaatggaatgcaatagaatggaatggaatcaactcgagtaaaatggaatggaatggaatggaatggaatggaatggaatggaattgaatggaatggaatggaatgcatttgaattgaatggacacgaaaagaatggattggaatggaatggaatgaagtagcctcgagtgcaatgatatggaatggcatcaactcgagtggaatggagtgaaaaaggtgaaaaaggaaataccttcacacaaaaactagacagaagcattctcagaatcttccttttgatgtgtgcattcaactcacagagttgaacctttcttttgatagagcagttttgaaacactctctttgtaggatctgcaactggacatttggagctctttgatacctacagtgaaaaaggaaatatcttcacataaaaacttcacagaagcattctcaaaaacatttttcagatgtgtgcattgaattc

SEQ ID NO: 115 - DNA, 3489 bp, Homo Sapiens
  misc_feature (2599)..(2599): n is a, c, g, or t
  misc_feature (2815)..(2815): n is a, c, g, or t
ctgcagggccccaacaaccctcaccaaaggccaaggtggtgaccgacggacccacagcggggtggctgggggagtcgaaactcgccagtctccactccactcccaaccgtggtgccccacgcgggcctgggagagtctgtgaggccgcccaccgcttgtcagtagagtgcgcccgcgagccgtaagcacagcccggcaacatgcggtcttcagacaggaaagtggccgcgaatgggaccggggtgcccagcggctgtggggactctgtcctgcggaaaccgcggtgacgagcacaagctcggtcaactggatgggaatcggcctggggggctggcaccgcgcccaccagggggtttgcggcacttccctctgcccctcagcaccccacccctactctccaggaacgtgaggtctgagccgtgatggtggcaggaaggggccctctgtgccatccgagtccccagggacccgcagctggcccccagccatgtgcaaagtatgtgcagggcgctggcaggcagggagcagcaggcatggtgtcccctgaggggagacagtggtctgggagggagaggtcctggaccctgagggaggtgatggggcaatgctcagccctgtctccggatgccaaaggaggggtgcggggaggccgtctttggagaattccaggatgggtgctgggtgagagagacgtgtgctggaactgtccagggcggaggtgggccctgcgggggccctcgggagggccctgctctgattggccggcagggcaggggcgggaattctggcgggccaccccagttagaaaaagcccgggctaggaccgaggagcagggtgagggagggggtgggatgggtggggggtaacgggggaaactggggaagtggggaaccgaggggcaaccaggggaagatggggtgctggaggagagcttgtgggagccaaggagcaccttggacatctggagtctggcaggagtgatgacgggtggaggggctagctcgaggcagggctggtggggcctgaggccagtgaggagtgtggagtaggtgcccaggcatcgtgcagacagggcgacatcagctggggacgatgggcctgagctagggctggaaagaagggggagccaggcattcatcccggtcacttttggttacaggacgtggcagctggttggacgaggggagctggtgggcagggtttgatcccagggcctgggcaacggaggtgtagctggcagcagcgggcaggtgaggaccccatctgccgggcaggtgagtcccttccctccccaggcctcgcttccccagccttctgaaagaaggaggtttaggggatcgagggctggcggggagaagcagacaccctcccagcagaggggcaggatgggggcaggagagttagcaaaggtgacatcttctcggggggagccgagactgcgcaaggctggggggttatgggcccgttccaggcagaaagagcaagagggcagggagggagcacaggggtggccagcgtagggtccagcacgtggggtggtaccccaggcctgggtcagacagggacatggcaggggacacaggacagaggggtccccagctgccacctcacccaccgcaattcatttagtagcaggcacaggggcagctccggcacggctttctcaggcctatgccggagcctcgagggctggagagcgggaagacaggcagtgctcggggagttgcagcaggacgtcaccaggagggcgaagcggccacgggaggggggccccgggacattgcgcagcaaggaggctgcaggggctcggcctgcgggcgccggtcccacgaggcactgcggcccagggtctggtgcggagagggcccacagtggacttggtgacgctgtatgccctcaccgctcagcccctggggctggcttggcagacagtacagcatccaggggagtcaagggcatggggcgagaccagactaggcgaggcgggcggggcggagtgaatgagctctcaggagggaggatggtgcaggcaggggtgaggagcgcagcgggcggcgagcgggaggcactggcctccagagcccgtggccaaggcgggcctcgcgggcggcgacggagccgggatcggtgcctcagcgttcgggctggagacgagggtgagtttttccccctctgccaccctcagcccccacccgcccctccccacacaaccaacacgttctccccacacgactctctcgttctccccacagccaggtctccagctggggtggacgtgcccaccagctgccgaaggccaagacgccaggtccggtggacgtgacaagcaggacatgacatggtccggtgtgacggcgaggacagaggaggcgcgtccggccttcctggtgagcgtgtctgccctccctgcgtcaggacggccctgcccagaccgccccgcgccaccatctcactgccccgacctctgtcttctacagaacaccttaggctggtggggctgcggcaagaagcgggtctgtttctttacttcctccacggagtcggcacactatggctgccctctgggctcccagaacccacaacatgaaaggtgagggncttcctgccacacttggggtggggggcacgcgagaggagctgagtgggacctcaactccttccccatccacagaaatggtgctacccagctcaagcctgggcctttgaatccggacacaaaaccctctagcttggaaatgaatatgctgcactttacaaccactgcactacctgactcaggaatcggctctggaaggtgagcaccagcgctccttnggaagcctccaggcccccgagcaccctgcccccatcccacccacgtgtcgctatctctaggtgaagctagaggaaccagacctcatcagcccaacatcaaagacaccatcggaacagcagcgcccgcagcacccaccccgcaccggcgactccatcttcatggccaccccctgcggtggacggttgaccaccagccaccacatcatcccagagctgagctcctccagcgggatgacgccgtccccaccacctccctcttcttctttttcatccttctgtctctttgtttctgagctttcctgtctttccttttttctgagagattcaaagcctccacgactctgtttcccccgtcccttctgaatttaatttgcactaagtcatttgcactggttggagttgtggagacggccttgagtctcagtacgagtgtgcgtgagtgtgagccaccttggcaagtgcctgtgcagggcccggccgccctccatctgggccgggtgactgggcgccggctgtgtgcccgaggcctcaccctgccctcgcctagtctggaagctccgaccgacatcacggagcagccttcaagcattccattacgccccatctcgctctgtgcccctccccaccagggcttcagcaggagccctggactcatcatcaataaacactgttac

SEQ ID NO: 116 - DNA, 2337 bp, Homo Sapiens
gagctcagagaggagagagtgcacatgcagccgacagtggcagggcaggaccaggaagtcaggcagtgtgacttgggggatccatgcttattctcctcccacctttcggaaggcacaggaaggcaccacagtgtcgcaatttatgcacaattagtgcaaagtctcacctgtgagcttgcctggggcaaccaggggaggctgggggctccttctccaccaggccccgctgcctccatatgactcttccctgtattttagccctgtaggtaattttccagtttgtgggctcctgtaccacatgcggtgagttaaaagaacaggtgggcagcggcgcggctcccgcgtgagctgtgtgactttgagcaggccccactacctttccgagccgcatttccacctgggcgaagcgggttgagccggcctggcggggaaagattcttttaacgggggaacaacgtaaggcgtgcaccggggaacacggatgctgctgagtcaatgcccgctctgccgttctctttgagagtaaggcttgcgtctcgcctgctctagcgccccaggtttgaacgcagtgggcgcgcaggaggaaacatagattcacgaatgcaatgccagcaaagtaaaatttttcacccttgtccgtttttcagggtgtttcaagcggaggagtcctgagtggagaagattccgcttccctgttttcaggttctggcagtcatggaccgggaagagcgagtcggggcgcgggtccctggcggtcgctggaacccttgtgagtgaggttggtgcccgcgagggcacagcgggcgctcgggaagtcgcagccgccggcagagggcgccccgggcacacggagcgcgcggcgctggggttggggcgctcgggaggtgcggggcaccggctggagtccggcgttgaccgcagccgggacgcgcccgccacctgggcggggaaggagtgagtcccctcggggcgcagcggcgcgcgctggcccggatcccagctgcgccgcgccctccctgcgagcggtgagtacaggcgcccacgggcatctccaaccctagttaggggacacttggagacaacgcaggtcggacgtccgccggccgttctaggagttggtgtgcggggaatggggggtgctcccgctcgcttagggctttgggtccggctaggggttgaccccaagaggcgctggatgtcggggctgagctttgctttcaggggactcaagcttacttgaggttctgacattggatttgcctcgcgggcccctgcgcgtgctgccgggggatccggagactggcgaggtaaccagggagggcaagcactcaccggggcgtcctccgcccacctcgcccgcagaaccatccagggggaccacgtgcggctgtcgcccgcaactctgcctgtcaagcgaggaccgcccccagggcaggggaggggacgcgcgggcggggtgggctgtgccccgcgggaaccccgccggcctgtgcgcttgctggtgccagctcggctcgctgcctcgcattgccacaggctcctgagaggtcgcgggcagtgcctgcggggaggcgcggggccctgctctgtagggctgaaggccgcccgaggttcgccaaggctctgggctctcgaaaggaagccaagaaaagaagctgcccaggtgaccagtcctgggagtgctctctcccaaggaagctccgagcgcccaggagcccttagccggggtctagtgccctttgaacaatctccagctcttcaaggaagtgggctgccgccgcctctcttgggacctggcctgggatcctttccccaaacgcaccccggcgatttttgcgcaccgggagccgaacccctgctgcgcgcagctggctgggctcaggcgcgcttcctcaacgtttcggagccgctgcccccagcgaagtccacattccaagctccaggggctttgagagagacgaccccaaggcaaggtaggtggctcggacgggctcgccctgggaattattaggttgggcttgacgtgagtaatgatgccatctgcttaagtcttggagaaagaccgtgtgttttccttttgctttttaaggcgtttggagagctgctgaggagccaggggcttggaggagcgagaagacatgtattttcagctgagtctcagaaggggagaatctcctgtcaccaccagaaaagcaacagccccgaaatgtgattgcaactgactagcagagcagaggcccaggagtcactggattgatgatttagaatatgctaaaaagccagtgctttatttggggaattcaggggctttctggtgcccaagacagtgacctgcag

SEQ ID NO: 117 - DNA, 847 bp, Homo Sapiens
agcgccaccggtatgcaggggccagcgggcagcgctgggaggaggggagtgggagcccgccagtgtaacccctctcttctccccctagcctcggaggctcccagcacctgcccaggcttcacccatggggaggctgctccgaggcccggcctccccctgcccctcctcctcctccaccagcttctcctcctcttcctctcccacctccggcggctgtgaacacggcctcttcccctacggcctacaggggcccctcctctaatgagtggtaggacctgtggggaagggccccactcagggatctcagacctagtgctcccttcctcctcaaaccgagagactcacactggacagggcaggaggaggggccgtgcctcccacccttctcagggacccccacgcctttgttgtttgaatggaaatggaaaagccagtattcttttataaaattatcttttggaacctgagcctgacattgggggaagtggaggcccggaaacggggtagcacccccattggggctataacggtcaaccatttctgtctcttctttttcccccaacctccccctcctgtcccctctgttcccgtcttccggtcattcttttctcctcctctctccttcctgctgtccttctcggccccgcctctgccctcatcctccctctcgtctttcgcacattctcctgatcctcttgccaccgtcccacgtggtcgcctgcatttctccgtgcgtcctccctgcactcatacccccccttcaacccgcccaaatgtccgatccccgaccttcctcgtgccgtcctcccctcccgcctcgctgggcgccctggccgcagacacgctc

SEQ ID NO: 118 - DNA, 420 bp, Homo Sapiens
tatacaaccaaagatattctaggtttaatttttctcctcctccttttaataattctagtactgttttcgcctgacctcctgagtgacccacatcattacaccttagtcaaccccctaaataccctgccccacattaaaccacagtgatactttttatttgcatacgcaatcttatgatccatccccaataaactatgaggcgtactggcccttcgattatccattctcattctagcagttgttcctgccctccacacatggcaaacaacaaagcatcatattccgcccattaagtcaatatctgtcctgaatcttagtcwccgacctattcacactcacatgaattggaggacagccagttgaacatccttttattaccatcggacagatagcatctatgatatatttctctattattct

SEQ ID NO: 119 - DNA, 1287 bp, Homo Sapiens
ttaggttggtgcaaaagtaattgcggtttttgcattgttggaatttgccgtttgatattggaatacattcttaaataaatgtggttatgttatacatcattttaatgcgcatttctcgctttacgtttttttgctaatgacttattacttgctgtttattttatgtttattttagactatggaaatgatgttagacaaaaagcaaattcgagcgattttcttattcgagttcaaaatgggtcgtaaagcggcggagacaactcgcaacatcaacaacgcatttggcccaggaactgctaacgaacgtacagtgcagtggtggttcaagaagttttgcaaaggagacgagagccttgaagatgaggagcgtagtggccggccatcggaagttgacaacgaccaattgagagcaatcatcgaagctgatcctcttacaactacgcgagaagttgccgaagaactcaacgtcgaccattctacggtcgttcggcatttgaagcaaattggaaaggtgaaaaagctcgataagtgggtgcctcatgagctgagcgaaaatcaaaaaaatcgtcgttttgaagtgtcgtcttctcttattctacgcaacaacaacgaaccatttctcgatcggattgtgacgtgcgacgaaaagtggattttatacgacaaccggcgacgaccagctcagtggttggaccgagaagaagctccaaagcacttcccaaagccaaacttgcaccaaaaaaaggtcatggtcactgtttggtggtctgctgccggtctgatccactacagctttctgaatcccggcgaaaccattacatctgagaagtatgctcagcaaatcgatgagatgcaccgaaaactgcaacgcctgcagccggcattggtcaacagaaagggcccaattcttctccacgacaacgcccgaccgcacgtcgcacaaccaacgcttcaaaagttgaacgaattgggctacgaagttttgcctcatccgccatattcacctgacctctcgccaaccgactaccacttcttcaagcatctcgacaactttttgcagggaaaacgcttccacaaccagcaggatgcagaaaatgctttccaagagttcgtcgaatcccgaagcacggatttttacgctacaggaataaacaaacttatttctcgttggcaaaaatgtgttgattgtaatggttcctattttgattaataaagatgtgtttgagcctagttataatgatttaaaattcacggtccaaaaccgcaattacttttgcaccaacctaa

SEQ ID NO: 120 - DNA, 44213 bp, Homo Sapiens
  misc_feature (34582)..(34582): n is a, c, g, or t
actgtgcccaacctcctttactgccatccatctttcacagccttcccggtgctttcctagggctcctaaaaacagtcactgtcacattatccatgtgcattccccagtccctcataagcacacatgaagtgtccatgccctctgtagccccaccaactgtttggaatctcttgattagcttctagaatccaggcattggagttggtggtctttctccatcccaacttacgtatgaaagagaggagaggagaacccgtggctctttgacataccttcatgtgaccctaaaagcattagggaaacgttatggaactgttacgaaaaaagaggttaataaatccaattgataagcacaatcaaaaccaacaggagaaccatgcattcttgtgctgcaatgccattacgaaatgaagtcctcgttaatacctcatactccccttcttggtccccaaactgggcacgtctactttgcattcaagtgcctgatgtgtgtgcgtgtgtgtgttttattttttattttttatttttttgagacaacctattgcctaggttggagtacagtggcatgatcactgctcactgcagcctcgatggcctgggctcaagtgatcctcctgccttagcctctgggtccctgggacagacaggcataccaccatgccctgctaatttttaacaattacttgtagagacaaagtgttgctatgttgcccaggctcttgatgtttctttacagccttcactcagtgcttttatggagtccatctctgaagagcagggcttatatttgagtttcaaaaatctaaagtctcagctggtggcaatttacatctgataatatatatgaccttggaagtctctggcagacataggaaaggggagtggacatctaaggactgaaaaatatcccaggccattttctgggtcatggaaaagtaacctgaccttcttatcccacctcctattcatcatccatctcacctcccatccccatcacattttaaattttaattaatttttcattggcagataaaagtcatatgtttatggtatacatacataaaacatgatattttaatgtatgtatacatgtggactggctagatcaagctaattaacatagccattaactcacatacctgttttttgtggtgagaacatttaaaatctaccatcttcataattttcaaacatacacagtgttattaaccataatcaccgtgttatacaacagatctcctgagcttattcctcccatctaactgacgttttgtatcctttgaccaacacctccccacccgcatcccttcttttactctgcttgagttcaacttttagattccacatgtaagcgagatcgtgtaatatatatcttttcattactggcttatttcacttagcataatgtgcaccagattcacccatgttgctgcagatggacttcaaaatgtaaaatattcttcatgagaatgaagttacccccccagaaagggggaccagttactccccagaaagaattaaaaagtagccgggcatggtggcacacacctgtaatccagctaatagggaggcttagttggggggatcacttgagcccaggagtttgagaccagtctcacagtctcagcaacatagccagaccctgtctcatatttttaaaacaagaattaaaaagcaagaatagtttgcagcaaacattttctgagagttttctagataatactaggtttagtccgccctccaaagtagtataattacatcatggttttaaaattaaaagcaaaaatataggtgaagcaaaagtgagctttattcatcgaaaatttgtcctcactcatcccatgtgactttttaaagtgtaattctaaggagactcccagcatccggatggcaaatacgtgaacagagaaacataaattaactggaagggaacaaaatagacctctcagctgaccaattctttgtagctttgacattggcctttaaaagaacgaggcaaacttttttaaagaaagttatctaatttaatgcaagaggtaactctctggctatgacttagggtaattaggcctattttctacattttggacgtgtttcctatggctggaatgtaaaagcttatttaatattgatgtaaccccaaaatttaagtaattggaatgcactatttctatcacattctattgagctgaagtataggttgtgctctgttcaattcaggttgtcttgacaaagactgagaaatagaatggccctccaagggcatacctgactattctgcggataacacagtcacgcaggcatttgctatagtgaaaatactgttatggttaagctagtggtatcttgtatttcaatgataccttacggtttaccagttttcatgtaatatattaacctatctcatttaatcattacagtgttccttggtgtacagatgaggaatcaaactcagatatgaggaatcaaactcagataggctaagggtggaggtagaccaggagaacctgcacccgcatgcattcttctcactgcaagttcaggcaggccaggagatgaaagccagcatgagccagtgaataagcaattatctgacaaacccaaggccagcagaagtaagataacatctttgttcccctccatttcttcctatgccatccagccctcaacccctgctaccttcaagccctgttgatactcacgccctcctgcccacattccttcggtggggcactgaagttttggtggaggggagcagagcgaggaactctttgtttgtgcagtaaggacttccttacaggaaatttcctgtgatggaaactctggggaaacttcctgttggttaggccactgccgggggctgataacctgaaccacttaaaaccttcagggctctgctgctgagaggatgggatggcccttccctgcttctccaagtctgggagggcaagaaagtccaagcgtacagaagcctcaggaatctccctgggatggtattttccaggagctaaaagctatggctctcatcagctgatcttattctagaagaccagccctcatggttaaatggactgcttagatttataacgagaatggtacctgcagcgacatactagctggatgcattaatagggctttggaaaccatctcaaagttctgggtctggttcttcatacatcattttaaaacatattcctgttatattactctccagtgttaagggtttatgagcactgcaaacatttattttcagctctcacttatgaacttggaattctaattaatccttgtcattgtcagacatggttgacactgtatgctgtgtgggtcacttagcaccaagtgtaaatcatctggggtatgtcttgcaggacgaccaatcttaagccatagcacaaaattcttaaatagactttacaatcatttcacctagtttggacttctggtggattattttgttctttgtcagcactccagcaaagataattactcctaaatcatgccttggattgaactgagctttgaatgtctccaatgttgggaattccgtaggttcccatagcagctctcctggcccagctcttagtttgaaagtttggtctcctaattagcctgaattttctctagtgacctataagcccattattgtaagccctgtccttattgtgtcataaaaataattgactccttgtcttcaatctatttcatataggtagacagctgccacatcaagaacgtcttgtaagtgcttgatttaccaaagtccatttctccacaagtttcttcatagttgttttcctggattgggggttattttagccttactttctaaaatgactggatttaatggaggcctctgtcagtcccaactctccaaatttctgccccagcttggtgctctttgctttgtttatagtaaataatcatttcagcatcagaataaatcagtgaactggacatgtctttaggtggacttttgagattatattcctggtccacattgcaaattagggaagaatgaaagaaattataattaactaggaagaaatttgtccgctgagaagtctcccttgttagactcctagaaaatagagaccataatattttataattttttgtcacagtttccatacatatttgttgaatgaatcctaaaagtcaaaagggagctgcttattggatttgagttgcttctagaacatgttaaaaattatgtgaattttctcaatgtatttgtaagaataagctgtcctcgtgattgagtattgatcttcaaaatggagaattatcagtggtgagtgatgctgcatgtaatgtacttataaaggataggaaaaatattttgtaaaaatgccttgggataagctttaaatataaaaatccaaaatggtgatttagtttggggcactcagaggaagaataagaatagggcctgtttaaattttttgcaacatgattactcctggttttacatttgattttgtattatagaatgagattaactggaatatgttataaatacagaaagtctgtcattataaacactagtcagcaccttttgtcttcataagaataattgctattttcaatgcatacttgctctaaaatagaccatattgatgtcataatatgtagactgagcaaaaatattattagtatcatcatgatcatcatcatcttctgatcttcatcaaagttgtattaaaatattttggtattctaaatatcattatcttttttgaaagcctacttagggtaatagaaggatcaggaactttggactctttgacagatttctagttttttctatttttttgctattctgtaaattctttcaaaagatttttatcaggtgtttactgcatactctgaggtgctgggatatatcagtgaccaaaacagatatgacccctgccttcatgttgcttacagtttaataggggagataagtgtctaccaaggaattcacactagccagagagcacattgcccacacagcatccagagtaatctgttgtaagataaatcagactgtcacttccctgtgccaaaacctccactggcttccagtttcatttggaaaccttctgagttctcagtatgaactgccaggccctgtgtgatctgaaatttgtaaatctcgtcaacctctccaccctcatcctccatcaccttgtgttctgctagttcctcttcagccaccctgatctttttgctattcttggaacacacaagtttatgttcctacctcagggcatttgcacttgctgcccttcggcctatgaagctgtttctccagatactctcatgttagagtccctcaccttatccaggcctctgcttaaatatcacctccttagagaagcttccccaacagcattatccaaacgacaccttccttcactctccatcacctttatcctgcactatttttcttcttggcaattttcaccacctgacatgtaattttttaaaacactggatggtgacccttaggtatctattcaaaatggccattcttgtgcacagctggggtatgatgccagtgggtccacctgtagggtaattggatgggcctggctgtctcatgggagactccagagtcttttcttttgggaaggcaagtttgtccaaaaagaaatcctgtgggctcctccttagaaagagtcaatatatgatggcacttgagcttttaccatgaagatttccactgagttcccctatattccagagctgctcacccttgctccctcctgaacttggcgttctcagattcatcctgattccagcaagggaaatgtcctttcatctgcaaggaggtgcaggttgctgggctgggggagggtggaatacagccatgccacagatgctttattagtcttctctgttccctgcctgccttcagaggcacttggaacccccagtttctgaggttttatgaagttctggtaggaaaacgagtttgtttattggtatctccccctgcaggcagattgagttaagattttctgctcagctgagtcagataccaattgtccgtctgttccagcttccaaaattttgtgcacctccctcaactgccattgtttcctctcccattctgttgtcttgtgggtttgtaccttttttattcctctatctggtttagtgggacgtcagacaggagcagggatagacaagatatgtctcatcaatgtagttacatgtggaggtaaaagcattgatgtagcagtacaggatgctttgaaagcataaaatacagaaatctggtctggtgtgtcgcatacatttaagaggagacttgaaagctaagtaggagttaattgggcaaagaagaaggtaggattatttctggggaggggaacagagcctgtgaaggccctgagactggaagaggatttgttctacagggaatggaaagcccagcccaactggcattcattgaatttgctgtggaaaagcagagtgacacattgctttggtgaggattgcagatggtgaggtagaacaagacagtcacgttaaggattttgatctttatcctaagagcaacaagcatccgtgtctgtgttacctcagtaaccttggacctcgtaaactctgggttcttttataaaccaggcacagtaatatctacctcacagagctgtgtgcattgcatgacatcatatacacactatattgacttaagactgtcatatttgtttgctcaactcatggatatgaagggcagactgtataccttgtcaggtacttttttctttttattgtatcccatgggggaaatggatggtagattggtggaggtggctagaattgtaaagaaaaatatgaaattcacatgaaggctggagttactcatatgacaacaacagcttatggggcccaattctattgctcttgcgtctgtcacacagttgaggttttggaatgaactacgtatgccatccttgttggacagtgacaagtcactgtagccccctaggagaagaacagtataatcaagatgtcaggttgaggaataatctttgtgatcaactgagtgaaaggtacaaagtaagaaacaattgagaggcattgctctgggcccaaaagtctagtaacaggcaattagaggttaaaggataagcatttgatagtgttctagctatactgcaaaatgaatgctgcatgaaggctaactgagaagcttatcagttggtagttgggaactaaagaggaagcaggcaccaaggaaagatggaaagttctacacacctttgttagttacacatggaggtaaatgcattgatgatgaatctgccatttttaggttttcatgtttaaaaagtttcctgacaatgtgtctagcaatgtgctagacactgtagataatatacaataaaatattaaagaggcggctcgtcctcaaggaactttcaagcattcatacatttctgtttgattgtaacatatttattattttaaagaactggccagagagttgcatgttctgtgtagggataaatagcaagtttcaggcccctgcatttattggcacttacgtacatggtagtcctcacacctttgccggacagcaccaaaaatcctgcggagctcaactctgtgacctcaccctttgagcctggaaatcagcatgaactcatgatctgacaatcccgaacaagctaagcatttcttaaaagaaagcagtgacttttaataggtctcactgatggtgttccaccgattaaatcagtcaaacagaattgtcacattgaagattatcttgggtttctagaattcattctaggttttaaagatgcagacagattctgagggtcacaaacgtcagtttgccaagtatgtttaggctgtaaagttatccatgaaaagaccgtgtggtttgcatgagattgattgtgatcggatgtaactacattgctttttacagctcagtagaaaccactttcaattgcaaattgtagcagaagcaggcgtctacttaattttgatcttaaagaatttcaaagagaataaatgcacactaaatagtggtggattttggtagtatacgccaacatcactttttatttaacacatgcagaaatgtgtactggtagagaaaattggtagagtgaattaaagtacagacagatccacattgactttaaatgaatacatgcacggtcagaaaacggtaaccctgggcaggaatctttaagttttcagggctcattagacagtgagcaggtgaggctcaaggctgagtttgcaactgtgctgtgaaaactcaaaaatgaaagtttttttcatttctgagcctgttgaaaagtgggtaagaagggaaagggcagtctcataataaaataatatgtaaaggctaaccaaataacccactttagtctttacttactggcaggcagcaacatgtcctatttacagagggaggctttacctaagtggttatatgtaaatgaaccaccttttcaatgaaacaggatgcacctgtctagaggtgtctgttactagagcaatggatgtttgattggactgacaaattttatttcctttttggaaaaaagaatgtaggtggtatcaaatcaccctttctcctggtaacaataggaattacttcttgaacttgagaaaccagtagttgcttgacttatgttttttgcatttagcatagtcttctaaagtagtaggagcatacgtttttgtctttaattccctgcagaccccttccccaatgatcatcagcaatacatccacccataaatcaatgaaatcataaaaaagaaacataaaattcacttgaaaaagaatacctacaaggcattcctagaattctcaatgtaagtcattttttgccagcaaagctaattgttctcaaatatttgataacaaggatggcatacgtagttcattccaaaacctcaactgtgtgacagacgcaagggcagtagaattgagccccataagctgttgttgtcatgtgagtaactccagccttcatgtgaatttcatatttttctttacaattctagccacctccaccaatctaccatccatttcccccatgggatacaataaaaagaaaaaagtacctgacaaggtatacagtctgcccttcatatccgtgagttgcacatccgtgattccatccagccacagatagaaaatattcagaaaaacaaaaaacaaaaaaaaaaaacccacaaatgcaacaataaaaaaatacagactttcagaatagcatataacaactatttagatagcatttacattgtattcgttacaagtaatctagagatgatttaaaatatacaggaggatgcacataggttatatgcaaatatacaccattttatataagggatttgagcatccatggattttggtatctgggcggggggtcctggagccaatcccttgtgtatgcagaggaatgactgtactggaaagcaaagtaaagctacaccaaagagggtaatagcaggctataaagtactgagagaaactaagagaagaaagtgaggtacctctgacaaaggagtgcttggaagagaaaggatgaatagaaaaatgggatttcagggaattcattgatgacaggatgacctacttaaaaatgacaagggccatgtgtggtggctcacacctgtaatcccagcactttgggaggccaaggtgggcagatcacttgaggtcaggagttggagacgagcctggccaacacggcaaaaccctatctctacaaaaaaatacaaaaattagctgggtgtgatggcacgcgcctgtagtcccagcttcttgggaggcatgaggtgggagaatgacctgcgctcaggaggttaaggctgtggtgagccgtgatcgtgccactgcactccagcctgggtgacacagggagaccctgtgtcaaaaaaaaaaaaagataggaagtgagcaaaagagaggtcatagataatggcatgatgaaacagaggaaaaaaaggataagaaggaggaagaaaaaatgtacaataaaacgagaaggaaggatgcaaaatgaatataggaaaaacaagagaactgaagacaagaggaaaaaaggagatggtagaagggaggaatgaaagtaagtaaaataggaatgaagttcaagatctatttagccatagctaaaggaacgtattatcagctattgatttcctcttctaataaagaggagaatgatatggatagtccagaataatggatcatttgcaaaacattaatgtgtcttgacttaaggtacatgtttataattacctcgaactgtatatttgtcttcttccatgtgtggttttaaattattttaccaaaatggggaagccaggagatacatacttgattcagtaaaaccagctttttattcgtagtttacttcctgctgcatccttttttcggctgagagggatcaatgtctgcaggtgtcccttaatccataattaaaccatatgcacatctaccctcccagtttccctgcccaccataaaaccttcatcttggctattgcttggaaaatggggagggaatagagcttctgcttttttttttttttttttttttttttgggaaaaagtcttgctgtgtcacccaggctggattgcagtggcgtgatctcagctcactgcaacttctgcctcccaaattcaagcaattctcctgcctcagcctcctgagtagctgggactacaggcacgcaccacaacgcccagctaattttttgtatttttaggagagacagggtttcaccatgttagctaggatggtctcagtctcctgacctcgtgatccgcccacttcaacctcccaaagtgctgggattacaggcgtgagccaccgcacctggctggaatggagcattttacttgagacctctgtgagctggtcctgagtatgagtagtgaattccaacccacttttctcctaatccctgtcgtgtcctagagtgagaatatacagaggggttggaagtgggtttatgttcatgggctttctagatggactttcaagtccaagtagaagtccaacttgagagctcgtgtagaaagcccttgaatgtaaacccgtgaagaaaagcacttccttatttcagaaagagcacaaaagaccagcaatccaaaggcatttcgaagaccttgaaagagctgggagtggcttaggtatggagggtgcatgtgtgagtacaaatggcccctcagctcagaaccaagcatctgtgtgccatgatccatggttcctaaatatcatggagggcaaaaagtataaatgtgaattaatgcaagagaaaccacactgaaataaaaaatacctgtggtctcttgagattcaagttggcaaaatccaatctaaaagatgtctgactatcacaattagtgaagtccacaggtcagattttcctctctgttcctgattaggattaacctggaaaggtggattgggtccatctttaataataactacaccttctgaaagatttgaaactattattatctctttgtttgctgctgctttcatagatttatggtaggacttggggttagatggatgatccaggtcacctattccagcctcacactctgcctctattccaaatatgacatcactgagcgatggccacccaccttcccttggatacctctaacaatgggaatctcactgtttcacaggcagctcttttttttttaaacacctccaattccaatttttaaacacctccaatgtccagaaagttctttaaactcttaaatacatgacatttattaaaacaaagcctcaaaccactttcagagtggtggtacagcaaataattgattcttttcagggtttttcccccctgtgttttttgtcttctctaactcaaatcattgcccggatattgcttataacaggagctcagcctcaaccagtctttctgcttttaccacatgctctagtggaatctagattaccggactcatttcgaatctaactaaaaatgagaaatgctctgtttatataaagcttggcaatcaataggaaaaggaaaggctgtttagcaaaggccagtgataattccaagaagcagtgtcttttggaatatgctatggtgacctggccactgcagctatctgcttatctgtctggtttcagatttccagaaaggactcgctgccttcgaaacacttcccagcccttccttgggtgcctggatttctaccattagcagtttactccttgagcatggatttttgcagaaagacatgtagaccagggagatggctcattaagctcttggtggtcatttcaccagagcatttagcatttttaaatcccttcctggatgcttgttttagtgatgatggtggtggtgagatgaagcagggatgtgtagatcatgaagggatgggaaaggggatgatttggttggaacgaagcaaaataacatttctgagtgcctgctaaggtccagcacttttcacacgtaaaattttcacaacaatccctgtgagttgggatccagtttctacagatgaggaaatgaagacaggagactagatgacctgaccaggtcctaggccagtcaggaacagagctgggatttaaaccagagctgcctggtccaaaacctgtgctggtcctgctattttatgacacctagaagggaaaagggcagagaactggaaagctgagatggaatcacctacttaagaattttgcagaaggctaaccctgtctaaaagcatcgctttgcaatcagacacatgtggcagtaaaaatgtcccaatgctaactcattttaagccttggttttagtctacctaaaatttatagaacactgtaaaatatgctacatgtaataagatatttattaggagtcttcttgcacttgttcagaatgctttttattatgtttctgctcattattgtagatattctcccattttggagaaattgaccgcgtgcacactcttcactggagttttgcacaaatcttaccagaaaactggtgaagatcagtcctgaggccccttccgcctctaattccttgcagtattttggctgtactatgtgctgttacactagatcacaataagcagctgccagtttcctcacaggttcccttggggaaggatatgggaataattcttaggaaccccccacaaattatagcaaccaatgcagtaaaacccctttagctcactcctccccctgtgctcactcacatactcaaatatatttagtgctttccttcctctcactccgacacttttgggagagccctgggggtggttgagtaccttgtccttgggtggattttcttgttttctgagactggctgccatcagacttcgggagaggatcttaccagaggcgggtctcttcttcccccgccaccgccctcagtattctttcacagccaccacaaagccacgctttctctgctaagtacacattcctaggactgtaacaaaaggcttctgtgagtttgaaagctgcaggggaggctcctgcgtgaaggcctaagatttaaagggtttcatttctcctgtgctggggactgtattgagtgcagtttgaaatctgcttcaccaccacaaggggaaatagaaatcagccctaaagctgcatggagaccccggctggtctttatcctcatagcttagtgatttcctgccacccaagaggcagtgaggggctccctgacattccggaggccccaggaaccctggctgcggtgacccggtgctggggagggagtgcatggggtaggctcctggttgtgagccttcagttcgccgggatgtctatgctgtgctgtgtggctacttagccaaggctgtgcatgccagccggagccaacagcttcagcaaacctgccctccggggagagtggatttcattgttttcaaagagatacaggaaatcagaattttccatccttccatggagagacttggattggactgagaagagaaccagcattaaaaaggaagtctccttccctttcttccctgcccctcctcaccccagccccagcccacccgccaggggcacaccctccctctgccggcctttgggtggaaaccttcctgcctgcagcacaggcagtgtgaactgcggggctgtctgagcaacccagctcttgccttttcagtagcagaggtaatgtggccacgactcagaattatgggaccccagatgctgaggaagtaaactgacttcttttcagctcacagcagacgcatagacaacagagtagatttcatgttctaatgaaacagtgtagaaactctgtccttggtggctcagtactgtgtggtatgagcctctgcctccctccctccctccctctttccttctcttttcctcccccaccccttcacggcctgccctttcctgattcttcagaactgacaactataaatccagcccaaattcctttaaacaaagggtcaccaagagcacgaccttgaaaagacttcttgtgatatgcacttgcagagttgcatattgttccttggatttaggacaggccaaagaaatcttccactttatttaagaagagcctgtgtggttcgaggccagggccgtggacataggattaaccacaataataatacaatgaagtacacatgcaaaatgaaaacttaataatgaagaactactgattttttccagggagtatcaagcacttccttgtaaattcttacaaggcatgaattatttcctagaaatgatttaggctcttttggaaaagtgcattgattcttttaacatcataattccagttacggtaaaacctccattatctgattttctgtgaattgcaaagctattattaactggtacattttatattttaccagtacagtgacagctgatatttataatggtgaccccaaagttctgtaaaatgccgaattacccactcaggaatcaaagaaagattaaattgtgttaaatagagtttttcatgttaagtgtcttatttttttcagatcttgttttagaaagtccaagtgtacatccaccataattttcgagggcagtaccaacttaaaatgttttatcttttcttggctttgtaaacaaaaccttgtaaaaaaaatttttttttttcaatactttgggttcaaactacagatcattcgatctcaaacctgacaggtaaacaaatttttttttcagagtaagtattgcagacatgaaagatcataaatgtgttcaccaaagtgagtgtgagacagatcaccccaaacactctccactatttctctatgatcttagcccagctgtgtgtgttgtgagtcatgcctgggtctgacaccagcattcagaggctggcatagcttagcatccacatcataaagggctcagatcgatggctctccttgtcaagctctgcagccctctctcaggctttgtgagatgtggtttgcatcattttcctttaaggaaatgttatgcagaaacataaatgcagtatacaacgaggaggctttcaccaagaaattaaaagggtacaaatgtctaggaatgcaggggttaagacaaaaatgtactgcagggaaagaaatgtgagcagaatgcccctcttttcgcctgcttctgccttgcatccagcccttcccggggagtgtgatgtgaactgccatccaaggtggctgtggtacaggggcagggtctgggggctgcttctgcagcttcagcgcagaaaacccagagctcagtcccagcaaaagcctaaaggagaaggaaacagaggccctaacacaacagaaaatgatgcaccccactttcctgtggttcatcagttcacatacttcccaggagaagtcaaatcacgccccagaataggatacctacttaggacttagtgatgttttatagtcatgtcgaagaaccttcacatccatggcctcatttgatctcacagcaagatgggcatgattaaaaaaaagaagttactcccactttccagatgagaaaacaaattcaaagacagtgagtgccttagctgagtcctatccaagcaaggcagggggcaaagccaggactaaaacacaaggttctaattccttctccatgatttcctgatgcccatcataccctaatagaataggatcaccctgcaaggcaactggtccacatggagagtcctcttggaggacaccgacccgtggtgccacctctgatttgcaagttggtgcattagacaagccctggaatgacagccagaagatctctattctgatcctggccctccgtctacttgggccactttgatcaagccatttagccccgttcccttcaggtggctcagctggaagtaagaatgataatgcccatgcagctgactcacctggtgactgtgaaggccaaatgagatgatgtgtttgaaagcactttgcaaactgtggagtattgccagccatttctcctaatttggctcagggcagaaagacatccaggtgaagagcttgatgtgtgtgatgacttaggcttggggatatttgtgaacaggacacaacaaataaattcgtttgacgggcagaggacagtatgctgggtatagtagaaactcttggaacctgcagttattgaagggtttaaaactcaaaaatgatacagaaggcagttctattacagtttctgcttttttgctgttcaacacctctgaagatagtgcgtttaatccttcctgggatggtaggttatagatgacttcatgctgaaagtgacccgtaaggaatatccgtatattttgaagtgtatgtggttcaccaggcagaaaacagtctgccaagtctctcatcccaggcagaaggggtggcacatgcgaaggccagagaatgcagtgcctctgagaactgtcagatgtcagtgtggctggagccaggtctgctagagggtgaggttggaagttaaccaggagtttaggaggccctgggaagcctctgaaaatatttaagcaaaaacagttagctttatgtttttgttgttgttgttgtttgagacggagtctcgctgtcacccaggctggagtgcaatggcgccgtctcggctcactgcaacctctgtctcccaggttcacaccattctcctccctcagcctcccaagtagctgggactacaggtgctcgccaccatgcctggctaaattttttgtatttttggtagagacgggggtttcaccatgttagccaggatggtctcgatctcctgacctcgtgatccacccgcctcagcctcccaaagtgctgggattacaggtgtgagccactgcgcccggccagctttatgtttttaaaagatcattgcctcgttcttggttctcagctctctgatccttttagtttttattggatagaggagagaccttaacgtatacagagactaaggaacttggaattggaaatctgcctggctccctttccctcaacgtgcctgcagtcagccatctttctccagctaagccgaaggatggtgggggcaccacacaacagagagctgagttagaaagggtgggagggaggtggctgaagggtccccactgcagttgacaatttgaaataaactcccactttccttcaatattttcctatagcaaatggaaactttgaccagataccagcttctttccatccttccattagactcacagcccagttaggatgttcacagtcccaagccagggatagcacatgccattaccatagtgggctggatagggggcaggaagcaatgctttccagcctttagaagcctctggtgatgtgctgtgaacatggtgagggaacccgaactttagagtcaaacaggctggtctgcaaaccccggttccagcactcactggactcaggatcttcccaagttagttaactcctctgaccatgtctgcattttctcatctggaaaatgggaacagtaatatccaccctccagagctgttatgaagatgaaattgaaagtgtctccaacgcaccaggtatatagtataatctcaatttatgcttttgcccttagatgccagaagttaatattctttcaatacttattctcgtagaagcaaaagagatcctgtttgtgtgatgttcctacagcctctgctgtactgtattatgaaagctcaagaaataggagttaatgatgaggcacagcaggaagaaaaatgtctctaagatgccaaacagggaaaatttaggaagaaataagaaccaaaaaataaatcagttgatcagggtaaaaaatgtcttatgctctgaacttataactctatggagtaatttccactaatgatctcagtgtctacttaactaatcatgtacttttctagccagaaagacagtacttgtagggtacgttccattttaatgcacaaatcattgttgcttttcaaaaagttatctttttttccctggccacacacagcaccccgaggcctggccagcccccatgccagctcaagagcatgaactcttaccggaatgggttctgtggggagtacaaagtcaaacataagtaggcttgcattcagagctcactgcctagcgggaaaaaagacatatgcactcataactctaatttaacacggcgtcctagaaattccatatccatcttcaaagttctctggaagcaaaaagacaggaggaaagacatttttagaaggaggcttcctggaaggagtgacttcagtttcaggccttaaaggagatgtgagtttccacatgcaaggagggaggaaaagcatgttgcagacagacgaagcaagtgtgtgagcaaaggcctgcggggtgacagggaggggtgttgggaggtgtgtatctggatgaaggcaggtatggaaagtgctgggaaaaaaggtctgggaaagggccttgggggccaggtgataaggaagttgaatgcctctttgaagagtggggttttattttatgtgcctttggtggggagttgtgaaggtttttattcaaaagagcagtggggctgggcacagtgactcacacctgtaatcccagcactttgggaggccaaggtgagcagatcacgtgaggccaggagtttgagaccagcctggccaacatggcgaaaccccatctctactaaaaaatacataagtaacaaaaattagctgagcgtggtgatgcatgcgtgtaatcccagctatgcaggaagttgaggcacaacaatcgcttgaacctgggaggcggaggttgcaatggcctgggattgtgccactgcaccccagcctgggcgacagagcgaaagagactctgtctcaaaaaaaaaaaaaaaaaaagcaatgggaatggttcttaaggaatatttctctgggcacactgtatgttctcactgaatatttggtgtggtttgggttttataccagttacgatatggggcttggtatctctgagcctaaaatctgtgctttccaaggacagtagaaatgctagtgttcactttgctcagtactcttccctccacttggcactcatgctgcttctcaagccttggggtgtccctggttctggagtccctcctacccctgcagcccttttctaagctatagtctcacccctcctctgcaggctcccaggcagcctcacctcctcctgcagagggatcagctgtcaccctgctcctccctcctggccctcagcctaccctacccacatgcattcaccatcttaccagtggaacaggcgtccctctcctgtatacagaggtcccttcccctgagctcttctgcctcagcctccccagtgggcttctcccctccttcacagtcagcctctttctcatttgcacctagttccattccatcttcaaagaagcccacttggattgcacatctctcttcactaccacaaatctggttcctcacagccaagttctggaaagagttctccacatggtgtcctcctcctcacctcccattagcgcctcaaccctccgtgatctggtttctacgcctgctgcccctctgccctggctgcagtccccagatgccgaatccatctgccatctgctgcccgaaactctcctggcttgcaagataccactgtcctctgacttgtccccggtcttgtcccctgctgttccctcctttaagaatacaccttttctaaattgcctgctgcctaaatgttttcctctggaaaactcacctactccagcggcttcaacgatcatcagtgcgatggggacttccaaatattttttatctctagcctgggcctttctcttaaataacagatgcatgtgtacaactgcctactgggcctctttacctagatgttgtacagttacctcacattcaacaaagctgaatatatcccccgccaatccatcctctgtgggatgagatgggcgggcccctctattcatctagtttcaggaatcaggagcttggattttgtcattgactgcttcctccacattgaattaatctcttaagttccatcaattctaccccatggtatcttcagcccatcctttctccatcccttctgctttagttcaggctaacaatatctgtcatctccatttctgcaacagcctctgactggccgccttgtaccagtcttgccctgttctaattcattctctactctgcagctggagtgatcctttgaaaacaatatccgattatgttacgcccttgtttaaaattcttcagtgactccttgtagccttaggataaagcctgaactccttagtacagcagacaaggccttccaaggccttcctaataatagctaacacttatgaagttcgcaatccataccccacactgttctaaggtccttacacatatgtcaacatacttaatgctcataattcctgacgtaggtcctgttactatccgagttttacagtggaggaaatcgaggcacagaaaggtaaggcaccttgcacaaggtcacacagctaggaagtgggagaaccaagattcaaacccaggaaacctgactccaggcccacactccttagcaccatgctgcactgtctccatcatgtgccgtagcttctcatccattcagaaatattatattgagtactgaaaatgggctagaagctgcttgagacactggggatatagcaggaatccaaacaaaggtccgttcacatgctagtgaagaaaatgagtaagaaacagcatgattagtaaaattattaggtagattagggatgaatgctaagagaaaacaaaaataagcaagaaagaagaccgggggagtctgagaacagatatgcgatgttagaaggagtgtccagggaggacttgaaggaagtgaggatgtctaggagaagaatatcagctgaaggaacagcaagtccaaaggccctgaggtgggaatagttcctggtaggtctgaggaacagcagagaggtcagcgtggctggagcagaatgaaggagggaaagggtgatggcaggaaaggatggtgggagctgggtacagacaggtcaggtcatatagggcccagaagatcattgtaaagaccttggcatgaactgtgagtgagagataggaagccactgggggattctgggcagagtgacatgatgaaacttacaaacagaggagtgatgtgatttgaatcaatctctggcaggtctgttgaggatagatgcagggaaggaacagtggaagctggcagaccagtcagggaccagtaacaatgatccaggcaagagaggatggtggctgggactaatgtagtagcagcagaggtggcggaagtgggcagagctggatacatttggaaggcagagccaataacacttaccaatggaccagaagggggtgtaaaagaagaaacaaggggctgggcacggtggctcacgcctgtaatcccagcactttgggaggctgaggtgggcggatcacaaagtcaggagatccagaccatcctggctaacacggcaaaaccccatctctactaaaaatacaaaaaaaaaattagctgggtgtggtggtgggcacctgtagtcccagcttctcgggaggctgaggtgggaaaatggtgtgaacccgggaggtggagcttacagtgagccgagatggcgccactgcactccagcctgggcaacagagtgagactcagtctcaaaaaaataaagaaagaaagaagaaacaagggcgactggaaggtgtggggccttggccacagaaagaatggagtttgccttctctgtgatgggaaagattgggaacagcagatttagatgagtgacatctggaggttggttggcctcattaagcctaacgtgcctattaagcatcaaaatggagatgttgaccgggcacagtggctcatgcctgtaatcccagcactttgggagtctgaggcaggaggattgcttgaggctagagtttgagaccagcctgggcaacgtagcaagaccccatctcttaaaaaaaaaatgtgttttagattagccgggtatggtggctcacttgtagtcctaaccacttggaaggctgaggcaaggggatcacttgaagccaggagttcgaggctgcagtgaaccatgatcccaccaccatacaacaactctgttgtctgggcaacagagggagattctgtctcttaaaaacaaacatggagatgcattgtcacctcccaccctcacccccatttgaacacacactcacatatatctcacgtcctaatcctactgaactactcaacatttccccaaaccggttgtgctcttttcatgtgtgcaggccttgcatccgctgttcctctgactggaaagctgttggcccatccagttgagaaagtcttccctggccgtgcacgaatgcactaacttgtaaatgtctctttacattcctttcttcccttccagaccgcaaaatccagtctcattcaccttgacatgccctgcgcctgatccgggacgcgaggcatagtgggcatctcctaggttagacggatgggtgagtgggtgagtgaacggagaggtggacaaaatgagtgctcagcagttagacccaactgtgttttgatggtagtgatgggaattcccctggcacatggccaggtgagatgatcattcagcctgaaatgaaagaaacagcagatgtcaggaagtttttgttaatcctgccttgtgcgttagaactctcccgcatacgtcccctttcccgcacactctctctacctttctcccccatttctagctcctggtcttattcatctgtagcatcagtaaacatataccctttactgttcacatccaggtctgtaggggaaattttggttataaaaccggaagagtgtttaacctaatgtcctgctgcgggcttgctttccacgggcctccgggtctgtcaaaatgatcaggcctcattatttaggaagctgcctcagccaggcattactaatttgggcattactaattcagatgcctattcaggcaaatgagcaatgaatgtaaagtgcttttgtcagtgaattgcaagtgaagagaagagggagtgggggaagtaaagggaaagtgatagaatgtttgagctttgcttcatttccagaaaggacagccattgcttcctggaagctgggcttggcaacaggcatggaggaatgggaaagatttatttccctttgccaaagctcaataattcagcttgagtatttcaaatcaatacatttcttgcaaagtttccaagggctgcattaaaacagccatttttaaaaattatcagtacatgacagcatcctccgacgagactggcatgtcagggatgagtcgagtcttccaaatagacaagactccagtgagaaaggaggctgccacaagcaggaaaagcgaagttagagctgacagcaagaccaaccgcacctgtagggcctctggcgttcacacacctcattggttttgtgggggctctttctgagatgagcagctggatcgctcctcctaagggcttgcatgggggaatctgtgactataactccgtatttctttgaagatgcaattcatcactgaacttgggaaagactaacttggggaggtctccaccacgatctaggattgctaagatgtctgacaggctgagtcactcatacttttgtgaactattaaaaatttcatagttctgacatctggacatcttgactttcggtgataggagatatggaaagacagtaaaaggctgtgtctttactgttgttttaatccccactagagagtcctttttttctttttttttttttttgagttggagtctggcaccgtctcccaggctggagtgcggtggtacgatctctgctcactgcaacctctgcctcccaggtggaaatgattctcttgcctcagccttccaagtaactgggatgacaggctcccatcactaggccaggctaattttttgtattttcagtagagacggggtttcactatgttggccaggctggtctcagacccctgaccttgtgatccgcctgcctcggcctcccaaaatgcgggattacaggtgtgagccaccgcacccggccagtaattccttctatttcgatgtttcatcttcactagaatcgttccttagttctttcggtgggagaagccattcagccccccttgactgccagtgccctttgaggctctcagccatttgattcttcctgtgtatcccctgtggttgttgtctctgtttctagagtgcagtggttcctgcactttgggctgtaaccccctttggtggggccagagaccccttagattaattatcacatttctttcacttactgccacaaaacccagcagcgattcactaggagaacccgaagattggtgctcttctttatgagacaccaaaggggctctgtgtttcccagcatgaagtcttcagtgacagagtctgggaggacagcacaggcagcagcagtgtaactctcagaatccccacggaagagcagagcagctcaatagcaaaaccaaaacccagcgacgagacatccccaagtcccaccttaatgggacttttggtagcctttggaacagggaaaacccaaaaatagccaagaggtattcaccagaaagcctgaaagtgggagtggttttgctcgttcctatagtagtgagggcaagtggcgtcgaggaggtctgaaaggtgtagagttctctgggccctgtgaactctgccactaaccagccacgctgatggccagctttcaggatagctgtggagaagctgctgggagtagaggcacattgaaaaggttagggatggccaggcatggtggctcacgcctataatcccagtactttgggaggccgaggcaggtggatcacctgaggtcaggagttcgagaccagcctggccaacatggtgaaaccccgtctctactaaaaagacaaaaattagccgggcgtggtgatgcatgcctgtaatcccagctattcaggagactgaggcaggattgaaccctggaggcggaagttgctgtgagcctagatcgcgctaatgcactccagcctgagcgacagagcaagactccatctcaaaaagaaaaagaaaaagaaaaggatggggcagcagagacttagatgcaaggtctcccaaaggaaacagaaccaggagatttcagaaagccagctgccatttatttgaatgctacatgaaaacaatagaagagagggtttgctaaggctggaaccatgccatttcataaaaatttcggaacattgtcttcagatgaaaatgagcaacagaaaagtagtgaggtcaaatcccacacaaagttttcataagataaaggaacagaaggagcagaatagcatccctcaagaaagcgtgccaaaacaacatgcctttagaacaattcaaaaccctacttacctccaaatgagctaaaaggtaagaagaaaaagatacgaagcgtggggcaaacacaacatcaatcagaattagaaaaacttccaaatgaaatgacagactctggaaagaattaaaagtaaaagaaaaatcatttcagaaatgaagagttaactagtgagaatacaagatgaatctttacaaaaggtgattttttaaaagagaaacacaagggggaagcaggaaattttttaaagaagaaacaagaaaggttttaaaaacaactcaagaaaaagtgacaaatattgaagaacggcaaagaaatttcaccacgtggataataggagtctctggggaaaaaaccacaaagcaagctttcgcctgcatcgctcctgtctctgcccctgtcttcacatggccatctcctctcctctgcgtctctcctctgtttccatataaggacacctgtcattgaatttggggcccacctgcataatcttgagatccttaacttaatgacgtctgcaaagagccattctcaaattaggtcttattcacaggttctggggattaggacacggacatttctatttggcagccaacattcagccatctccagtcactgagctagtaagtgacaaaaacaggatttgaatttcgttgtttcattttattataacgtggttaagagagattttaaatatttccattaagttagcaattcttgccaacaacagtagaaagcatgcctttttttttttttttttttttaaagtcagagcctcattctgtcacccaggctggagtgcagtggtataatcatagctcactgcagccactcctaggctgaagcaattctcccacctcaaccttctgagtagctgggacttcaggcatgcactaccacacctggctaatttattttgtttttcaaggagatggggctcttgctatgttgcccaggctggtctcgaactcctggcctcaagcagtcctctcacattggcttcccaaagtgctgagattacaagtgtgagccacaggacctggccaacagcatgcttttacaaatagtagggtagcaggaggccagcctgcagaccgcccagagacctcaccccatcttacgctctgcccaacctcaggggagcatttttgcacttggtggattagcattacttgctccatccatgatgagccactcatgctcttcacagattttccagactcccatgtcaaagttaaaaaacagacatcggcctctttccagaactcagaatattcacatctatattgttaacactcataccttttccagcacagaatgaaaagcacctttgaagaatcgtaagccatgaatgatgacgggccgaagggagtgagggctcctacctcttgtcactcctaccatcctgcctccaggacccctgccacctacttgggagtctgcccttaaaactcaagggtcacctgactcattcctccccactcattcatctgactacccaccaaagctaagtgtgaacagcctgtattgatttatcattttccttttgcctgcttcctctggtacagagatcttcatgctttcatccaaacgaatgaataatgtaaaatcccaggtggggtgacagagccaaggagaaaagtgttctgcagcaagggagggcctcccagtatgagccttggagtctcagataagcccagggacaaagcatgagacatccagttacatatctgtggccctggaaggggagacggggttcgctttgtggtggtgtttagctttcctgactccaagtgaccatcttaagccaggggattagtaacctttacaactctaatactagggaatatattaataactggtgagaaaaaagattacagcttttttattgataggtctataaaagccatttccgtatgaatgtcctcagaaaggaggaataaggggatgagatagaatagaatagagagaagtctgtctcacacacacacacacacacacacacacacacacacacacacaaatgcaacacaattatctttaaatagaagttgcttctccaagtttgtttttttttgtttgtttgtttcatgaggcgtcagcaacgctgttaaaatgatttcatcctgcctgtgtgtcacagcagtctgccccgcgaaatgctgaatcagcagcagcccagacagcctttcggtggagggtagattcgacacccaaaggcaaccaaccgggcctttgaaagcacttggaagcactctccaaagagccagggaagaggacaaggaagaagggggtgcagtggaattctccttaaaaaacagcatgttctagaaaagccatgctttggaggtgctgtaggtcagatttgcctttggggccctatgtgtattttctgaggtctgttcatgtaaaagttcaacacctctttcgcactcccttctcccagcccccgcgccctgcccccacacctcctgtccacctccacctcctcctcctggaattcagtgattatcaggactgtctccatcctgagaagaggctttttaaaatttcgcaggagaatagagacacccgagagggctgggaacaggcacagctgagccacacaaagccaagcctcctccatgcaagtgacggacagatcaggtcccagttcagaatgagaatgagttttactctggttacactttgcacaggaatgttctgcagactgtgccgggcaccagagatggtccgtgtgcggtttaaaagagcaggaggggaaagaattttcatccttctttattcaggcaccctcaggagagtatccatgttctgtgaatcatgcaaatcctgcaggatctttatgttctctgtaccccatccatttctgctgaggattacaaacattcttgcaccaactttcctccagcagtttcgatttctcaataaatctgtttgaggaacatttcaactcttaatatctattttcctactttttttttcttcttaaactcaggcttctttgtaagcatacatatcagtaagtttgataataaaaatgacctttctgccctgcagtataggaaatgctgccttaatgcctctttgctttagaaactcatccttgtatagtatctctccttgcatagccaagttgcctcattgtacgtaaattaaggttatttgcagtgattgaccctaactactatgaagaaaaactttcaatatgttagcaatgatgtctataataactgaagaagggacattccctatttaaggtcaggactgtgcatttcaaataaagaaatgacagctcaaacatttcattgtacccccacttctaagtgagaagagggcacccttcgtgtctctcttttctgtttttctccctgaaatatcaggagagacatatatctctcttaaacctgatttggttttcgcattacctcacaggtacatattgtcagaactatttgcatacacgagactaaaaaaaatactaaacggattctccagggatccatggataaacttgaggtagtctataagctttgaaatcacaagcaaatatttgtgtccatgtgcctgtgcattttgaaggggggtttgtttatgaactctggctgaattctcaaagaatcctgtaccttcttcctaacgctgagaagtacttgctctaatctcttccccactccctttttgctgtcccctccccattatcttttttctttttgatatggactttaattaaaatgttgatgcttacgtcaccatacattttctgcattaattttgatttttaaaatattgcgttacatgacttaatcttgattactgaaactttttaaaggtaccccttaaattttgctcctggggcaaatgtcttacttgcctcagcctagcctggggcctgagcgggcacctccttcagccttctttcctccaacctctccctgatccaggctgttttccgcaaccccacctgagccattttcccagcctgcaagatgacaattcagtcccctcctcaaagcactgtactgggcctcatagctcctgccagagccgtcatgcaccttccaagaatgcttgctccagcttctgcagctccagggagctgctgaaagtattttggtcttctggagacacgggacaaagtacaactcatctactatccagtccttgtcctacccaaccccccaaaatgcattgagcacttgctctgtaccaggcactgtgcaacatctctatagggatcacctcatttcatgctcacatttgccctaagaggtaagtactattctggactccatcttaccgctggagaaacagattcagacacataactaacccagcgctagtaagtggtgcagccggtgttttaacccaggacaatttgactgcgaaacccaaggtctgatctaaaatgctacatggctctcaccacattgggcttgctacccagaagcaaaaatgagaagaactcttctaagtcacgtttgtgaggctgagtggcaagctctgggtcagttttgctgtcaacacgttttctgctaaaaacccgtttgtagctaaaactagataaaagtcagaaaaatccacaaaatgaagtttataagaaaaaacatcattcgagggaattgactgtgactttggatctgaacatgaacatagagtgttcttgttcttggactttgggctgaaagacatgagtataaccttccgacctccacttggaaacttagtgctgagatacaggctaaccttgaggacagaaataggaaatgttttggaacttccaattccctagtgacaggatttgtttgcagaaagcagctttggtcagatagcacattcaagattacaggcagacccagaggagtgagatgtggagcttgtcagaatgcatccaaggctggcctgggggttttgagcagatttgcagagagcaggccggtggggaagggaaaggaggcagaaaagtctccggaaaagtgcctctgggaagcagcttgaagggctctgaggacacttggttttcttttgaagggcagagtacacagggaagaactctaagtaaaccctgccctcggcaagcagaggtcagaaggtgctctgtgggcaccgagcagtattcgggatctgcagctagaccaggcctgccatgagaagttgagtttatggtttattattcctcattcccttaacatttttacagtgcattttagagtgcaaggggcttttacatccattatttcctttaacccaggggaagttcactgggtaatacagaaagcctggagctggagttttggtcttaggttcattgtgaccttgggaaagtccctcgatttctgaacttcagtttcttctgaaaatacagttgtgccagctttagctccctcgcagaatagatgatggcatgacatggatgcggaagcatctggtaatgttttgaactgcacagagctgagtgtcctgaccatcaaagccagagctggagtaagtgatcagatgtgtcggggaggagaggggtgccaatcacagactgcagagctggctcagatgtggactgcctaggaatggaaatctttggctgtacagtctggcattaaacctggggactgttatgtgccaggcaccgtgtgcaaatcactgcaaaatccccttcagctacatgcatggacatgttaactcttaacacatgtacctaacaattcacaatttcatctcccagaaggtggaagatgcattgaggagcattgctaatttgcactcaaatctgacaaatgaggaattgtctggaaaagtagaaatgatagcagagggtgagaataaaaacatgattttaggattggggaagggaaatgagagacaagaacagatgtgttttcttgacttaagacaaatttttaaaatgtagggaaaagtatttatgatctcatgatctgaatgctgagacacaactcagagtcatttgggctgctcttgaaaatgaaatcctgacttatcaactgcatatgacccttattggaataagaaggaagggagacaactaaagaaactgatgaggcgatattggggatattctctgattagctcaatttttaaatagtttgtgtgtgtgtgtgtctgtgtctgtgtgtgtctgtgtgtgtgtttgtttgttttgaaatagagtctcactctgttgcccaggctggagtgcagtggtgcaatctcggctcactgcaaactccacctcttgggttcaagcaattctcttgcctcagcttcccaagtagctgggattacaggcgcctgccaccatgcccagctaatttttgtatttcagtagagacagtgtttcaccgtgttggccaggctggtctcaaactcctgacctcaagcaatccaccggccttggcctcccaaagtgctgggattacaggtgtgagccaccacacccagcccttaaatagttttttaaatataaaagtaaaacatgcttaatagagaatgagaaataagaaagaaaaaaggaaaaggagacagggaatatcacctacaattttactgagtgtcaattctttgaatatttttacgtttcattgtatttttctatgcattgagattattacatatgtacacatactatttttcaatatgaatacatactcttcatcatgttactggctgcattaattttctatcatagatattgtcagtaactattacttatttccttattgctgttcctagtttttcattattaaaaataacactgcaatagacatctttgtgcatgaaagattcttccacatactaagttatttctttaaggtagattctgagaagttaacatttacagggttcttaaaatatcactaagttgtttgccagagagatgatgccaatttatcttctcactgttttgtgagtaccagtctaatgagctccgatttttaaaaagatgtatataatggatgaaaaagcaacttaatgaaaagaaacatataaaggagagtttctgagctctagaattttaaaacgtaagtgagctgaaaaccatggaatacgcttaagaaaacaataaatgtgggcagcaggataagaataagcatgatgtcagcctgctgatggggttggatggggtaacatcagcaaatggcaaagaaaccaaaactgttcaacttctttctctctcccatgaaggagaatgattgtcagactgaaacaggtagtgcaaacattgacagaagggaattgaagcctgagatgggtgaattgattgtaaaagcaaactaagttctgaataaatgcaaggctcttggcccggacaaatgacatcccagggtcgagaactcagaggggtgaaagataagccactggcagtgatccttcagggttgtgggaaatggaagctgtactaaaagaataggaactgttggtaacctgattttaggaagagaagctggggaaaatgtgggtacgaaataaaacagctaacctgatggaacttccagataaaattcaggacagattttcaaacatacatgttacgagtggaagacattatcactttggagccagccatctgctcctcatcctctctcctcatcttctttaataaggttgctctaagtgttgtagttgctgtatttcaggatatcaggaaggcgtttcgttgaatttctgatgttgctttcatggatgagcttggaaaatgtccaaaaaccagagtatttagatggattgatcattgaacaactcttcccaaaaggagtcaataacttgatcagtatccgtccaaaaggaggtgactggtgtgtcaccagggtactcccatctcagccctatacgatctgcactttgtcagtaacctgtggaggtgacagatgcttagcaaagccacagatgacgtgaaattacagagtatagatgctagaaatcgatggaaatctggagaagactgcagcaggctgggatgatggttaaaaataataagataaaatgtaatatcaattaatatacattcttacagttgggttccaagtgctagctatatatgttcaggtagggtgagattataaaggtgattataacaataacagtacaaaagcaatagctaatgttttttaagtgattgctctatgccagatattggcctgtgtgtttcatatcatcatcatgtgtataattttactctacactagttttatgtcatctgaaaattgtataagtacattatctatgattcaatgatatttaattcacaggatgaaagttgtcctcatttttcagttgacaccagcaagacacagagaggttaagtaacttgtacaaggtcacacagctggaaaatagaggttccatgcttgtgctcagtgcctgcatgctgaactaccgtgaaactttttctttttaaaatttagtcataaatttaatttgatatcctgccaaaacaccaaataagcttagagagttaggtagtttttaacgtgggctcggagccaggtcacctggattcaaatgtcagctcttccatttcctggctgagtgactttgggcaagtcgtttaacttccctgtgttctagttttctcctccataaatggggatcattcctgtcttacaggattgctgcagggattaaatgagttacatatgcaaagcatttagaatgactcctggcacatagcaatcacttgcttacaagtaagtgcattgctgttattaggctacacaaaaagcactatggtggggtgttaagagttgacactgtagagntagaccacctggatctctgtcatggcaccaccacttccatctctgtgtgctacagttttctcatctgtaaaaaaagaataataatcattgcagtgataagattcagtgtaaatgttcagtaattgctagctgttactatcaatagaagtatattgtccagagaaagaaaaatgctagtcctgttcctactgctgcgtttaggaattgaagccacatagatctctggaggaggcaggcaggttggtaagggtctacaaactgcagtggaggagttatctttggaccaattaaggacgtttcatctggaggcaaaatgactaagcaaggacgtgataactgtcctcactgtgttgagggttacaaaattggtgtgggtcattgaatcaagttatgagacaacatgggatgttgggaaaagtcaggggatcaggggcaggttgatcctgagtcagtctcttaacttccaggcttcagcttccatctttcacattttatgattctgtctccagcacgtagaacctagagcaaattcctgtttatacagaaagtttggataaagagtggttttgctgaatggctactgtagcagaaaagcttgaactgagtgttgctcaaatcaataaaatcacctgatgactaagccctgttttctattaaactgaaaagagaatgcaacagacttcactgggcttttgtgagaattacatgaggtaatatgtatgaaagcaccttatcaactctgaagtactaccccgatgcaagcagttatgttgattattgccatagctagattataacttttccaagaattagaatataatgaaacacacttaagcattaatctgtcttctgtgattcagaagatccttcaggaagttacaaaatctcagggtcatggccatgggcatggagtaattctgtagaaaaagatcctggctgtaaggtattctttggttttttggattcaaattaaataggagcatactgactacatgaaaccctgaagggaatagagatcacatactctaagcccgtcattgtacagatgaagtcactgagccacagagaagctgagtggcctgcccagaatcaaatgttaattcatggcagatctgggaataaaatccaggctcctgtctcccaacatgtttgtcatcattagtttaagaacatctcagaaagtctgaaacagggtcaaaatgtactgatgaatgtggctgcccattaaagcatggaattgaagaaatattagaagtaagtttaagggcctgggtgtgtcactgaaggatatgacacaatatactggacctactcgggagaggggagaagtacagtagaatttttagtaactttcttaatcacagcagttcactttctctgtacaaaattcttttcaaatattctctgaaactaattggcattaaaaatgctgatcttagtaaatggccctcaagaggcacgctatgcgcacagggaatagtataatataggtgcagagtaatggtctctctccttctctcctttttttccttttcctaatgatcattaacatctatattctttgactttgttgaattaaagttgcaagagatggccgtaaataaagcaagttatgtatgtgcctccctcattctgcccatgcagcttctgttccatttgcagctgtgagccgtgtaagactctcaagaccaagcacccatgagtgcctgggagcaagtagcctgtgaagggaggactttattcctggatgcattaaaagcagagtcccacctacacctccctcctcttcccatttataaatctacttctccagggatctacagattttttggctatatttttagtctgttgataatttgagaaagtctccaaggatctaagtcttggatgggtaggagtcaattcactcagtcttttttgaatccctaatggatgttcaaaaccagtctcaattctggatctggatgggacatgcatgtcgaagtacagtgtgatggataagagcacagattctggaaccagattgcctgggttcagatctccgcttctgtcattactagggttatgtgaccttgggcaagtcccttaaatgcgttgggcctcagtttcctaatctgaatccctatcatagggttgtgtgagcatgcagttgaatgagctaatatctattcatataaagtgcttagagcagtactaggtgcatagtagtgcttagtaaatgactattaagtaaattaaatcagcctgattagaattgcctccaggtgcaaggctctatcccatttagacacgctaacacacaaggtcttaagggctttaggtttaaggaaaaggggctttttcccccctcaattctacaccacaacctttttattctattgaattacaaaggaaataacagtgggacttgactttgaacaccaaagtttatccagcctctttccagctcggtgaacgtgtccacctacttcactctttatgctaaaggaagagcagcgacgctgataaatgtattgagtggcctcgagcaggtggcttgctctgtcaagatcacttttgtatgactgctgggatcaccacagtctcccctgtaacttgctgggttcctcttgtacataagccgagggcatttgcatcggttcctggtgagggggtttccacacggtggccctggttgcttcaggggctgggctgtgggagacattaatgggaagtgaaaagagaaactgttgtgcttaaccggcagagctgtttggagtgtgactcttcttgtatttagggaaaagattactcatgagtattttcttccatagaatataaagaacctcaaattactacttgcatcccccacccccttctcacccacctccctccgttgcagcgtgtcctctgcagaaacttcagcattttactctcaattcccctcccaagcaggattcagttctgtatttgctttggggcccatgtttccaataagccaccctgtactttttcctgtttctgcctgagcatcttctgctcactggacctctcacctccaggcaccttcctaggcctgaggaaccagaccttcacatgtgtcccctaatgggaactccctgtgtgaaggagaggaaggtccataataacaaatcgcagcgccattcttgttcaaaggtgacaccattgacagtaaggagttaggtttaaggtttttaccagttcaaaaactgagattttgctgagtaaccctcactgccactcccacctccctgtgattctagatacgtgttttcaaggtcattggagagagctggtacttcccatatccatggactgtttttaataggcatcactttctggccagtcaggagtcaaaaacaaaaacttttagtggctgtattttattctaaagatcataaagcagtaatgcaccataaattattatttgaaattctaatttgtttccatgtgaaaaaaaaattatcctaaaaacaccaagaaaaaagctcttaaatgctcatctctaatgatttccagtgcccagtagttcttttttttggtgcaccacaaaaaagggattttggttttgaggggacttccacaggtttagaggaagccaactaccattcctcaaaactacactttgcaaaggagccacttggaagacaatcatgcccagaggccctggacattttccagggcatttgagccgtttgttccccacttcagcaggtaggaagagcagccccatatagcaaaccagattgttctttggcatgcctggtttaggatgaaaggtaattttttccaggatcaaactgagggacacttttataacacacttgtgaagtcttcgtagcaagtttaagtaacttatagtgagagacggaagctcctcttagcaacactgatgccattgctctgtttgagctattgattcacaccatgtgattttagagaatgaagatccattgaacatccagcttcttctgacccagcagttcttaaatttggtctcatgtctccttttgattcttaaaaattaatggagaccccaaagagcttttgcttatatgggttatagttatctgtagttaccatattattacataaattaaacctgggtatttacaaaatatttatgaatttagcaagtaaaatagccaactctatattaatgcaaacatattttaaaatatattttcccaaaccaaaaataatttgtgagaagagtagcattgttacacatttttgaaagtctcttaaaatctggcttaatggaagatggctggacgctcatctctgtttctgcattcaatctgttgcaagatcacatcatatgccttctagaacattccacctaagaaagaatgagagcgaaaaaggcaaataattaatattgttatgacaagatgttttacttcataggcaccctacaaaggtctcgggaaccctgatgggtcccaagatcacattttgagaaccactgttctaacttatcaaagatttctcacaacagcaaaataaaataaaactatagacttacagtcaggctcccagagagccaacctgagccaacctctcagcccctgctctgtacccccctcctgcccacttggttcctactcagagttcaagtaccaccccaccaggaagctctaatgtcagtgagtagaataaaaaggcagaagaccttttatccttactttgccctcttattgccagaggccagcctgatggtttcccagaggctgagtgaattgctcttcctggaagaagtttcagggaacatttcattatttggcagctctggaaggtcaagctcagctctggaacattctttcttcagaaggacgctgggctgcaatcagatcagctctgaatctgaggaccctccaaccacactgacacgtgtcatagttctgagcccctgtgggtgctgtgggcaccctggaacagcccctggaactgggcaaggaagggcaggtctctaagacctaccatcccttaaacacataaaagatctttttctcattttgcctctaaataaaaagttaatctgacagcacaccccagagtagggtttggtgtacaaactgctccctggactcctcttggaggctgcttctgggcttcgagaagcccccagtggggcggctcaaacaagggctggagaggggactcagagttgaacataagggctcttgagatgtggagactcattttgttaactattcagagaccttctccctttattccagctgtctaactgacaagacctttctctctttctttctgcctcatgctctctccaacaggcttgcagccaatttactggagcagggatgacgtagcccagtggctcaagtgggctgaaaatgagttttctttaaggccaattgacagcaacacgtttgaaatgaatggcaaagctctcctgctgctgaccaaagaggactttcgctatcgatctcctcattcaggtgagagtctggactcttggcatatgcccaacttggaaagtctcttagttagtggttggtctttaacacccctcacccggcccaagaaatcccaacagtgagtcatcacaaggaagggatgacgatggaaggaagttgaaggaagattatgctagcatgagccagtttgagggaagaagaggaagtgtttacagaccaagggggagaattttaagtttaggagaggaacccagtttagtcctacgtacactggaacttaagggctctaactgtgccactaagaagaaaaagaaggctggccgtggtggctcactcctataatcccagcactttgggaggccaaggagggtgaattgcttgagcccaggagtttgagaccagcctgggcaatgtggcaaaacctcatctctacagaaattttaaaaattagctgagtgtggtggtgtacacctgtagtcccagctactcaagaggctgaggtgggaggattgcttgagccaaagaggtggaggctgcagtgagctgagattgcaccactgcactccagcccaggtgacagagcgagaacctgtctcagaaaaagaaaaaaatgccattttggccttttgactctctaaaagagatagctgagagtgaatgcaggctgtgaactgctcaaccgaaaacaaagagaggaaggagaaggacgtagaagggctagaaaagaaaatagaactgggggaactgcagataaagactgggaaatgggagatcctagtagccaaggccagtttagaaaggcttcaagtggtttcccttagaagtaggactcgtttgaggtaatgcatcttgtagcctgtagaaatcctaaaaaatacaagcagaggtctcctcgggctcatctgactcagaaagcttgtgtaattaagggctcctgataatgcattagaagatttccattcagtaacaagcatctctacctgcagagtgtattgctcatgtggataaggcttcaaagatttgtctcagtttcatttcctaaaccctgtggatatttagaaggtacctgtctgggaactacatatgtcaaaggggaactgtggtctcaggtttatgcctcttgcgggattaattactgaagtactcaaggccctccttttactgaatcccactgcagacctcgactctgatgtaacttgacaaagggcgaggatcctgcagaaggtcttggcatagtccctaactacgttcaacctttatttactcctggagacctgccagaagttaataaactaaccgtcatgaggaaacgtccctcattacaggagatgagataaagccccagcacccgtatctccactgttcttcccagttgccacagaccgtttatatgaagaaatgctaaagaagttccccagaagtagagatgttattgaaacttgaaagtttatatcttcaaaattgagtaatttggaagggacacaaacatacctgaaacattttgtctcatatcatcaattctgtatgtaatctcacaataagaaaactataaaacaaccatgtaaataaatcagactatcctaaatagttcttttgaatttattacaaaatacttcccttttctattccagtggaaactcagagatattatactcaaagaggcaacgttatatatctggaggaaaaatccctacctctttgtgttccaatgaaaccattcatgtaaagcaagcaaaggaaaatacagtggtgggttttgacttgatttgacttggaccttgggcaagctttcctcccaagtctctataaatttccccttcatcctatctcaggtgcacttttttatagctggtttattttcctccacagtgacctcttagcattatttgtgaaactgggttctctctgctcagagctatgaacaaagatacgtgaaaatctgtccgcagttccttgccactttgtcgagtctttgtcaggtgggccatgtggaagatggtgctgctctcaaggaagttactgtccagttagaggcaggattgcgttgatctaaaggccaaagaaggctggaggagggagagagcagagtagcactggtgtcgggagagaaggaatggagttggtttggaccatgaagaatgggtgggattgagtaggcagagggtaattggaacagcatcaccaagtatatttgggtgatggtgagaatgcccacctgatgagtagaagaggcagaaaaggcaggaagccctgataagcctgatgcactagaatggatgtgaggtgctatatagatcagttaggaggtggcaatagaaattcattccatgagtattcaccaagcaactctatgccagaggtacacaggtacaggctaagggagttcagagattagaggggccatttctagctggcttgtcgaacaaacctcatagacaaggtaatggagcctgactttgaaaactttgaaaggcaaacaagaaggagatgaggaagcatgttaagaaggagatgtaggccgggcgcggtggctcacgcctgtaatcccagcactttgggaggccgaggcgggcggatcacgaggtcaggagatcgagaccatcccggctaaaacggtgaaaccccgtctctcctaaaaatacaaaaaattagccgggcgtagtggcgggcgcctgtagtcccagctacttgggaggctgaggcaggagaatggcgtgaacccgggaggcggagcttgcagtgagccgagatcccgccactgcactccagcctgggcgacagagcgagactccgtctcaaaaaaaaaaaaaaaaaagaagaagaaggagatgtaggctggtgtacatggaagaggaattcagagacaagactgcacgtgctagacactccctttgaaacatggtcgaacatcactcaccatgcctctccggcttgtctgattgcctcctcacatttcaaactggtggactgtctcctggaaggcttctcttgactcccatccctacttccctaattccattccactttcctttctcccatcttgttctacctccatctaggctaggtgctgtttctcctttatcttagagcattctttccctctgtcatggcccttgacacagatacacacacacacacacagtgttatacattgtttgctgattgtttgctactccggatccctcccctagagtggaaagttcaatgtgggcagtgattgtgttctattaagtcgccaagtctccagtacctaacaccagggcatggcttccaggtggcactcaacaaatgtaggttgaatgatgacccggtttgagagtacccaggttaagaagtttgggttttattttacaggtaattggaaccactggaaagttttgatcagggaaatatgattggagctctctttttgcaacagacattttccaccagtgcgtagggtagattcattggcttacttaaagcaggaaagctagttagagtgtccttgctgtgatcctaatgggaggcagtgaagcccagactggatcagtgagatcaaaataatactcaggcacaaagtggctagctaagatggggagctgacttggaagtagtggttagagttcatttttaagcaagcaatgccaggacattcaagaaaacttgtcctgatctgcagttggacatctaaaacaagaggcaggccagggctgggaataatagatgtgagcatcatacatcgtctccattatgtagaattttatgagctggggataaagataaatttatacggaaggtaatttaattaaggcacccactagaaagccatggacagaatttcaaggcgatgcctgccagcagggcctgtaggaaaacttaccacagaacacaggagtattgcgaatgggtttataagacaactaagttggagttgagaagacccatctgatgaaggggtcactcagcaagagggggaaggccacaggcatcctccttaggcaggggcaagatctagattgaaaatcctttttattttccagatgtaacatttgccactgtttcttctgacatgggctttctcctttagcagtttggtgtagtgaaagtcctcaggcctggcttctttctacacctggcccttcacaaatcacgtcacttcacttggccttattttcctcatccacaaaatgcagttctcaccacat

SEQ ID NO: 121 - DNA, 2043 bp, Homo Sapiens; identical to SEQ ID NO: 88

SEQ ID NO: 122 - DNA, 225 bp, Homo Sapiens
  misc_feature (106)..(110): n is a, c, g, or t
  misc_feature (205)..(206): n is a, c, g, or t
tcttacggcaggcagcagtagcgggagaaggtggaagatccttcaatgtgctggaaaatcaccaacctagcaccctgtgttgttcaagagtacaaaaaaaaaaaannnnnctcgagggggggcccggtacccaattcgccctatagtgagtcgtattacaattcactggccgtcgttttacaacgtcgtgactgggaaaaccctnngttaccaacttattgcctt

SEQ ID NO: 123 - DNA, 265 bp, Homo Sapiens
tctggaaaaaacacgctttattgggtagacaaataggcctgatgggaaggcctgagtcacagtgcactggggagtgaaaaagtaggcaaagtgcttgaagcttcccctttgcccccaccttaacctcctggggagcagctctggacactcagtacccagacctgggctcagcaaggcctggggtgactgtgcccctcactcctgctgcctgatctgggcagcccacccttcactggtaagacagaattctcaagggataggcgca

SEQ ID NO: 124 - DNA, 252 bp, Homo Sapiens
ttttttttttttttaaaagcttcaagatgcttttatgtcaagggtgtggggttgccctgcttggcctgcagtgctttggggccccatgtggtggaggggtgggcaccatggtacccaccaccctgctgcctgggcagaagtgcaacatggcacacgatgcctgggggatcactccccccagggactcatggtcagtgtccactcacaaggcctgcttccctcatgacatctggccagtgacacccacagggg

SEQ ID NO: 125 - DNA, 395 bp, Homo Sapiens
taacctggaatatttattctccagtgagctagcctgaagcaggtggaggcatccaataaaatacaaccttaaggaactaccttttctatttttaacaaaccccgagtcagaaatctggcaatatcttaggaacctctctacttgatgaaacagacaactttaatttaaagcaagacagtatgtcccaattccctactctcagctatgtggtacaatgaaatgcccttgttcttgacctaaaccctaaaaaagaatggaggaaaaaaaatcagggtgaaactgacggccatactttgcctgtactctactagagggcaaatttgttatactttcttcattccatatattgactctaccaatggactgtggtaacaaccataccaatggaaggccaa

SEQ ID NO: 126 - DNA, 393 bp, Homo Sapiens
  misc_feature (115)..(115): n is a, c, g, or t
taatttttggtagagatggggtttcaccgtgttagccaggatggtctggatctcctgacctcgtgatcgacccgcctcggcctcccaaagtgctgggattacaggcgtgacaccnatgcctggcccctcactttcaattttctgcacgagtttgtgtaaaatggaagatatgtattcctaggatgtttgtcagaatgtggtggtgaatcctggagttcattcgtggaaagcctttgactactgatatctttctgtaatgattctggaacggttcaggttggctgtgctttcttgtgtcagttttggcgggtttggtttcctagcaattggtgacctttttcactgtttttcaaactgactggaataaaatggtccataatacccgcttcatcc

SEQ ID NO: 127 - DNA, 562 bp, Homo Sapiens
  misc_feature (5)..(6): n is a, c, g, or t
  misc_feature (68)..(68): n is a, c, g, or t
  misc_feature (70)..(70): n is a, c, g, or t
  misc_feature (499)..(499): n is a, c, g, or t
  misc_feature (504)..(504): n is a, c, g, or t
  misc_feature (521)..(521): n is a, c, g, or t
gttanngatttatttatttatttgagatggagtcttgctctgttgcccaggccagagcgcagtagcgntncttcggctcactgtaacctccacctcctgtgatctcctgacggtgaactcctgactttgtgatccacccgcctcggcctcctaaagtggtgggattacaagggagagccaccgcgcccggtctttttattttgttttttaaatgtttagtagagatgcagtctcgctatgttgtctaggctggtcctgaactcctgagctcaagctatcttcctccctcagccttccaaagtgttgggattacaggggtgagccaccgtgctcagctgctaaagacttttaaatcataaggaaaaggataactgcaggaacatcatcaggaactcagacgcctgggcaaaggtaaaccacactggtttcttatgacagaaaccctccttgattcccttcaccaccaccaaattctcccctttgcccagcagcctagggngaggnaataggggactgctttntcactacccatgaagagagggactttggatccctgatattt

SEQ ID NO: 128 - DNA, 112 bp, Homo Sapiens
ttaagaaataagaaatacatatatattgaaaaagtgataaatgtaggtatcctgagattctcaactataaaaagaacagtaatagcaatttgaataatacacataaaatcct

SEQ ID NO: 129 - DNA, 377 bp, Homo Sapiens
  misc_feature (67)..(67): n is a, c, g, or t
  misc_feature (323)..(323): n is a, c, g, or t
ggagcaacatgctgttttaatgagagcctgggtgctggcgggctgaggctaaaacggcgtcaccccnagtgaggatggggcaaaggttttatagtctcctgtaaacaggaagtgtcctggtctgacgtaactgcaacgttgtacccagatggcctctttctccatcttcagaggtacttgtcttccggctggctctcttcctgcttttgctatcttgctggcgcatctgctcacgcacgctgctgatgcaagcggccttgcgcccctggggctgcggcctgagaagggaggagttgctcaaccccttaagctttcaggccctnggagagaatcttacaatatcagaagtgggattcacataagcgcttcccgtgacc

SEQ ID NO: 130 - DNA, 158 bp, Homo Sapiens
gatcagcccgccccagcctcccaaagtgctgggatgacaggccctgagccacaatgcccggccccctgtccttaaggagcttacattctggtgcgggtgacaccgtgaaatcagtgtacgggacatcagctggtaataaacgtcacggaggtcagaaa

SEQ ID NO: 131 - DNA, 538 bp, Homo Sapiens
  misc_feature (374)..(374): n is a, c, g, or t
  misc_feature (381)..(381): n is a, c, g, or t
  misc_feature (435)..(435): n is a, c, g, or t
  misc_feature (442)..(442): n is a, c, g, or t
  misc_feature (473)..(473): n is a, c, g, or t
  misc_feature (508)..(508): n is a, c, g, or t
  misc_feature (533)..(533): n is a, c, g, or t
ttttttttttgctagtcacaaagcccaactttttattgaagtataacatacacacagaaaagtgcccagatcaaaagtgtacagctccaagaatgttcacaaacggaaagcacccaggtaaccgggcaaccagatcaagaaacagaacaccccaggaagcaccacctcatgcccccttctggttactgtcttcttagggactgatctctacttggcaaccgcatgggatggaattttggctggggttttaaactttatataaatgggaatcctatgggtgcatttttgccttatctcgttcaacactaggggttgggtgaatacacttccaaggttggggggtgggagtttgcaggcttcatttccccatttgncagtctnggggatttcccttcgtgtggaaatattacccctaattgtggctttattcccggnccaaacnggggggctttggggggtgtttttcccgtttncaggggtttttttttggggggagtttttttttgtngaaggttttagggggcttttttttntgggg

SEQ ID NO: 132 - DNA, 535 bp, Homo Sapiens
  misc_feature (8)..(8): n is a, c, g, or t
  misc_feature (322)..(322): n is a, c, g, or t
  misc_feature (376)..(376): n is a, c, g, or t
  misc_feature (407)..(407): n is a, c, g, or t
  misc_feature (418)..(418): n is a, c, g, or t
  misc_feature (426)..(426): n is a, c, g, or t
  misc_feature (436)..(436): n is a, c, g, or t
  misc_feature (469)..(469): n is a, c, g, or t
  misc_feature (477)..(477): n is a, c, g, or t
  misc_feature (490)..(490): n is a, c, g, or t
  misc_feature (516)..(516): n is a, c, g, or t
  misc_feature (526)..(526): n is a, c, g, or t
cttggtantctcaagtcctccctatgtttcccaggctggtctcaaactcctgggctcaagcaatcctcctgccttggctctcaaagtgctgggatcacaggcatgagcactgttatgtgtttttaatgtgttcccttctattacccctccctctctacctcccggggaagagaaaaagtagagaaggaaagttgacaattcccttgttccctcaaggagtaacagctcaccctgcaggcatacagcagggaactctcagaccaagggaggacgtaggaagggagtgggttttgggggatgccaccagcaccagggagagctntgggtggctagggcaggaggtggaataatttcatttcacaggctttccagagtnttaagggtagaaagagcccagggagattttnatgagggtttncagagatnggagaaactnaggcaaaatggggttgtttactttgctgaaagncccagatnggggaggaaattnatggggggcccccctcttccttcaangggccccatntggcccctt

SEQ ID NO: 133 - DNA, 477 bp, Homo Sapiens
taagaaactgaagatgaaaacacaacaatctttttatttatgtaaatcagattaacactggacaataaaccaatttctacccattaccataacagcttgtttataaagaacagaaaaattcagataggattctatctagggtcaagaggttttttaaccacccattcacagaggtatagattcacagataaataatcccaaactacttgctcgccatatttacacattcccattaaattaagcataaataaatatatacaaacttaacatgaataccctccagagctcttctcgtgaagagtcaatagattgatatttcttgattgtgtggcaaaaacaatgttagagaattagagaccaactcaaaggtggagtcgattttggcatttaaagaaggatagtgttcattccgttaaaaaaaaattgatacttttttttttaagccagtaatttcacatacatcgtcaaaggtggggg

SEQ ID NO: 134 - DNA, 294 bp, Homo Sapiens
  misc_feature (161)..(161): n is a, c, g, or t
  misc_feature (182)..(182): n is a, c, g, or t
  misc_feature (216)..(217): n is a, c, g, or t
  misc_feature (275)..(275): n is a, c, g, or t
gtagagacagggttttgctaagttgcacagactggtctcaagtgatcctcccaccatgacctcccaaagtgctgggattacaggtatgagctaccacttccagccctaggcagggtttttacatcagcactgaagaacgagtattgagcaaattggtaccnctgagtttttatccaaaatgnaaataaatgttaaaatttagtacaatattatagnntaattttgctaaattcaagaaaggtcaggaatgaacatttgttaatggttatatgccnaacaaaataaatgctttcc

SEQ ID NO: 135 - DNA, 252 bp, Homo Sapiens
  misc_feature (48)..(48): n is a, c, g, or t
cctaggctggtctccaactactgggctcaagcgatcctcctgcctcancctcccaaggtgctgggaccccaggcatgagccacagcaccaggccaaaagcaaggtatttacagggaattaaagtagataagacaaacatttttggggcacttgtctggtaagtacactgctgcaaacactttacatgcataatcacttaattctcacaattagtacaattatcctcattttgcaaataaggaaactgggaac

SEQ ID NO: 136 - DNA, 295 bp, Homo Sapiens
  misc_feature (84)..(84): n is a, c, g, or t
  misc_feature (201)..(201): n is a, c, g, or t
  misc_feature (282)..(282): n is a, c, g, or t
  misc_feature (288)..(288): n is a, c, g, or t
ttttttttttttttttttttttttctgagatggttctcgctacgttgcctaggctgtagcgcagaagctatacacaggcatganggcagcacactacagtctccaattcctgggctcaagtggtccttctgcttcacctcctgagtagctgggactacagggacgtgccaccccacctggcatgatacctatttcacagantctgttactatagaaaaacagctctcctactcacttttttcttgtaaaattgtataacattattaggcaaaactgggagantacaanttttaaa

SEQ ID NO: 137 - DNA, 71 bp, Homo Sapiens
tttttttttcagctgggctacaggtttattctggcactggaggtgaaagggggctggtgtggccagcaccg

SEQ ID NO: 138 - DNA, 1063 bp, Homo Sapiens
cggggagaccatggggcccctctcagccccttcctgcacacacctcatcacttggaagggggtcctgctcacagcatcacttttaaacttctggaatccgcccaccactgccgaagtcacgattgaagcccagccacccaaagtttctgaggggaaggatgttcttctacttgttcacaatttgccccagaatcttcctggctacttctggtacaaaggggaaatgacggacctctaccattacattatatcgtatatagttgatggtaaaataattatatatgggcctgcatacagtggaagagaaacagtatattccaacgcatccctgctgatccagaatgtcacccggaaggatgcaggaacctacaccttacacatcataaagcgaggtgatgagactagagaagaaattcgacatttcaccttcaccttatactatggtccagacctccccagaatttacccttcattcacctattacggttcaggagaaaacctcgacttgtcctgcttcacggaatctaacccaccggcagagtatttttggacaattaatgggaagtttcagcaatcaggacaaaagctctttatcccccaaattactagaaatcatagcgggctctatgtttgctctgttcataactcagccactggcaaggaaatctccaaatccatgacagtcaaagtctctggtccctgccatggagacctgacagagtttcagtcatgactgcaacaactgagacactgagaaaaagaacaggctgataccttcatgaaattcaagacaaagaagaaaaaaactcaatgttattggactaaataatcaaaaggataatgttttcataattttttattggaaaatgtgctgattctttgaatgttttattctccagatttatgaactttttttcttcagcaattggtaaagtatacttttgtaaacaaaaattgaaatatttgcttttgctgtctatctgaatgccccagaattgtgaaactactcatgagtactcataggtttatggtaataaagttatttgcacatgttccgtagttt

SEQ ID NO: 139 - DNA, 427 bp, Homo Sapiens; identical to SEQ ID NO: 105
  misc_feature (13)..(13): n is a, c, g, or t
  misc_feature (21)..(21): n is a, c, g, or t
  misc_feature (24)..(24): n is a, c, g, or t
  misc_feature (50)..(50): n is a, c, g, or t
  misc_feature (57)..(57): n is a, c, g, or t
  misc_feature (79)..(79): n is a, c, g, or t
  misc_feature (92)..(92): n is a, c, g, or t
  misc_feature (95)..(95): n is a, c, g, or t
  misc_feature (109)..(109): n is a, c, g, or t
  misc_feature (114)..(114): n is a, c, g, or t
  misc_feature (117)..(117): n is a, c, g, or t
  misc_feature (406)..(406): n is a, c, g, or t

SEQ ID NO: 140 - DNA, 101 bp, Homo Sapiens
gatctcagcaatttgaacactaacctctcccctcctggctcaagaattactccgaagtcagtctgcagaaaataaatatttagtatgacatgacacttaaa

SEQ ID NO: 141 - DNA, 374 bp, Homo Sapiens
gagaggtctgctactttattttgataatgcagggatattatttatctttgcagaatcaggtgactcccaacgttcccggaatcttctagtggtctgtgtcaggggtctgggctggctggggttcagtgatgtctactggaggcagcttccatgccttctggggtcctgagtctccatggcttgtggggtctgggtcccccctggattagtggatggccagagtggcatagacactgggctcagctggagaggccccttcctgggatggaggaggctcagttgccttctgtctgaagggtaaaagctgtgcagctgggcgtaggtcacatcctggggggcttcagatgcagcagcctcagtgtccatctgtctgt

SEQ ID NO: 142 - DNA, 2533 bp, Homo Sapiens; identical to SEQ ID NO: 83

SEQ ID NO: 143 - DNA, 10564 bp, Homo Sapiens
ctacacacttcttgaaggcaaaggcaatgctgaagtcacctttcatgttcaaatcatattaaaaagttagcaagatgtaattatcagtgtactatgtaaatctttgtgaatgatcaataattacatattttcattatatatattttagtagataatatttatatacattcaacattctaaatatagaaagtttacagagaaaaataaagcctttttttccaatcctgtcctccacctctgcatcccattcttcttcacagaggcaactgattcaagtcattacatagttattgagtgttaactacaactatgttaagtacagctatatatgttagatgccgtagccacagaaatcagtttacaatctaatgcagtggatacagcatgtatacatataatataaggttgctacaaatgctatctgaggtagagctgtttgaaagaatactaatacttaaatgtttaattcaactgacttgattgacaactgattagctgagtggaaaagatggatgagaaagattgtgagacttaattggctggtggtatggtgatatgattgacaataactgctaagtcagagagggatatattaaggaggagaagaaaagcaacaaatctggttttgatgtgttcactttgttataattattgattatttactgaatatgaatatttatctttgtttttgagtcaataaatatacctttgtaaagacagaattaaagtattagtatttctttcaaactggaggcatttctcccactaacatatttcatcaaaacttataataagcttggttccagaggaagaaatgagggataaccaaaaatagagacattaataatagtgtaacgcccagtgataaatctcaataggcagtgatgacagacatgttttcccaaacacaaggatgctgtaagggccaaacagaaatgatggcccctccccagcacctcattttgccccttccttcagctatgcctctactctcctttagatacaagggaggtggatttttctcttctctgagatagcttgatggaaccacaggaacaatgaagtgggctcctggctcttttctctgtggcagatggggtgccatgcccaccttcagacaaagggaagattgagctcaaaagctccctgagaagtgagagcctatgaacatggttgacacagagggacaggaatgtatttccagggtcattcattcctgggaatagtgaactgggacatgggggaagtcagtctcctcctgccacagccacagattaaaaataataatgttaactgatccctaggctaaaataatagtgttaactgatccctaagctaagaaagttcttttggtaattcaggtgatggcagcaggacccatcttaaggatagactaggtttgcttagttcgaggtcatatctgtttgctctcagccatgtactggaagaagttgcatcacacagcctccaggactgccctcctcctcacagcaatggataatgcttcactagcctttgcagataattttggatcagagaaaaaaccttgagctgggccaaaaaggaggagcttcaacctgtgtgcaaaatctgggaacctgacagtataggttgggggccaggatgaggaaaaaggaacgggaaagacctgcccacccttctggtaaggaggccccgtgatcagctccagccatttgcagtcctggctatcccaggagcttacataaagggacaattggagcctgagaggtgacagtgctgacactacaaggctcggagctccgggcactcagacatcatgagttggtccttgcacccccggaatttaattctctacttctatgctcttttatttctctcttcaacatgtgtagcagtaagtgtgctcttcacaaaacgttgtttaaaatggaaagctggaaaataaaacagataataaactagtgaaattttcgtattttttctcttttagtatgttgctaccagagacaactgctgcatcttagatgaaagattcgtaagtagtttttatgtttctccctttgtgtgtgaactggagaggggcagaggaatagaaataattccctcataaatatcatctggcacttgtaactttttaaaaacatagtctaggttttacctatttttcttaatagattttaagagtagcatctgtctacatttttaatcactgttatattttcagggtagttattgtccaactacctgtggcattgcagatttcctgtctacttatcaaaccaaagtagacaaggatctacagtctttggaagacatcttacatcaagttgaaaacaaaacatcagaagtcaaacagctgataaaagcaatccaactcacttataatcctgatgaatcatcaaaaccaagtgagaaaataaagactactgaccaaaaaataataataataatctgtgaagttcttttgctgttgttttagttgttctatttgcttaaggatttttatgtctctgatcctatattacagatatgatagacgctgctactttgaagtccaggataatgttagaagaaattatgaaatatgaagcatcgattttaacacatgactcaagtattcggtaaggatttttgttttaatttgctctgcaagactgatttagtttttatttaatattctatacttgagtgaaagtaatttttaatgtgttttccccatttataatatcccagtgacattatgcctgattatgttgagcatagtagagatagaagtttttagtgcaatataaattatactgggttataattgcttattaataatcacattgaagaaagatgttctagatgtcttcaaatgctagtttgaccatatttatcaaaaattttttccccatcccccatttatcttacaacataaaatcaatctcataggaatttgggtgttgaaaataaaatcctctttataaaaatgctgacaaattggtggttaaaaaaattagcaagcagaggcatagtaaggattttggctcctaaagtaaattatattgaatgtggagcaggaagaaacatgtcttgagagactaagtgtggcaaatattgcaaagctcatattgatcattgcagaatgaacctgcatagtctcttcccttcatttggaagtgaatgtctctgttaaagcttctcagggactcataaactttctgaacataaggtctcagatacagttttaatatttttccccaatttttttttctgaatttttctcaaagcagcttgagaaattgagataaatagtagctagggagaagtggcccaggaaagatttctcctctttttgctatcagagggcccttgttattattgttattattattacttgcattattattgtccatcattgaagttgaaggaggttattgtacagaaattgcctaagacaaggtagagggaaaacgtggacaaatagtttgtctacccttttttacttcaaagaaagaacggtttatgcattgtagacagttttctatcatttttggatatttgcaagccaccctgtaagtaactacaaaaggagggtttttacttcccccagtccattcccaaagctatgtaaccagaagcattaaagaagaaaggggaagtatctgttgttttattttacatacaataacgttccagatcatgtccctgtgtaagttatattttagattgaagcttatatgtatagcctcagtagatccacaagtgaaaggtatactccttcagcacatgtgaattactgaactgagcttttcctgcttctaaagcatcagggggtgttcctattaaccagtctcgccactcttgcaggttgctatctgctgtcccttatgcataaagtaaaaagcaaaatgtcaatgacatttgcttattgacaaggactttgttatttgtgttgggagttgagacaatatgccccattctaagtaaaaagattcaggtccacattgtattcctgttttaattgattttttgatttgtttttctttttcaaaaagtttataattttaattcatgttaatttagtaatataattttacattttcctcaagaatggaataatttatcagaaagcacttcttaagaaaatacttagcagtttccaaagaaaatataaaattactcttctgaaaggaatacttatttttgtcttcttatttttgttatcttatgtttctgtttgtagatatttgcaggaaatatataattcaaataatcaaaagattgttaacctgaaagagaaggtagcccagcttgaagcacagtgccaggaaccttgcaaagacacggtgcaaatccatgatatcactgggaaaggtaactgatgaaggttatattgggattaggttcatcaaagtaagtaatgtaaaggagaaagtatgtactggaaagtataggaatagtttagaaagtggctacccattaagtctaagaatttcagttgtctagacctttcttgaatagctaaaaaaaacagtttaaaaggaatgctgatgtgaaaagtaagaaaattattcttggaaaatgaatagtttactacatgttaaaagctatttttcaaggctggcacagtcttacctgcatttcaaaccacagtaaaagtcgattctccttctctagattgtcaagacattgccaataagggagctaaacagagcgggctttactttattaaacctctgaaagctaaccagcaattcttagtctactgtgaaatcgatgggtctggaaatggatggactgtgtttcagaaggtaattttttccccaccatgtgtatttaataaattcctacattgtttctgccatatggcagatacttttctaagcaccttgtgaaccgtagctcatttaatccttgcaatagccctaagaggaaggtacttctgttactcctatttacagaaaaggaaactgaggcacacaaggttaaataacttgcccaagaccacataactaataagcaacagagtcagcatttgaacctaggcagtatagtttcagagtttgtgacttgactctatattgtactggcactgactttgtagattcatggtggcacataatcatagtaccacagtgacaaataaaaagaaggaaactcttttgtcaggtaggtcaagacctgaggtttcccatcacaagatgaggaagcccaacaccaccccccaccaccccaccaccatcaccaccctttcacacaccagaggatacacttgggctgctccaagacaaggaacctgtgttgcatctgccacttgctgatacccactaggaatcttggctcctttactttctgtttacctcccaccactgttataactgtttctacagggggcgctcagagggaatgaatggtggaagcattagttgccagacaccgattgagcaatgggttccatcataagtgtaagaatcagtaatatccagctagagttctgaagtcgtctaggtgtctttttaatattaccactcatttagaatttatgatgtgccagaaaccctcttaagtatttctcttatattctctctcatgatccttgcagcaaccctaagaagtaaccatcatttttcctatttgatacatgaggaaactgaggtagcttggccaagatcacttagttgggagttgatagaaccagtgctctgtatttttgacaaaatgttgacagcattctctttacatgcattgatagtctattttctccttttgctcttgcaaatgtgtaattagagacttgatggcagtgtagatttcaagaaaaactggattcaatataaagaaggatttggacatctgtctcctactggcacaacagaattttggctgggaaatgagaagattcatttgataagcacacagtctgccatcccatatgcattaagagtggaactggaagactggaatggcagaaccaggtactgttttgaaatgacttccaactttttattgtaaagattgcctggaatgtgcactttccaactatcaatagacaatggcaaatgcagcctgacaaatgcaaacagcacatccagccaccattttctccaggagtctgtttggttcttgggcaatccaaaaaggtaaattctattcaggatgaatctaagtgtattggtacaatctaattaccctggaaccattcagagtaatagctaattactgaacttttaatcagtcccaggaattgagcataaaattataattttatctagtctaaattactatttcatgaagcaggtattattattaatcccattttatagattaacttgctcaaagtcacattgctgataagtggtagaggtagaattcagactcaagtagtttaactttagagcctgtcctcttaacaactatcctggttgaaaagcaaatacagcctcttcagacttctcagtgccttgatggccatttattctgtcaaatcatgagctaccctaaaagtaaaccagctagctcttttgatgatctagaggcttctttttgcttgagatatttgaaggttttaagcattgttacctaattaaaatgcagaaaaatatccaaccctcttgttatgtttaaggaatagtgaaatatattgtcttcaaacacatggacttttttttattgcttggttggtttttaatccagaaagtgctatagtcagtagaccttcttctaggaaaggaccttccatttcccagccactggagattagaaaataagctaaatattttctggaaatttctgttcattcattaaggcccatcctttcccccactctatagaagtgttgtccacttgcacaattttttccaggaaagaatctctctaactccttcagctcacatgctttggaccacacagggaagactttgattgtgtaatgccctcagaagctctccttcttgccactaccacactgatttgaggaagaaaatccctttagcacctaacccttcaggtgctatgagtggctaatggaactgtacctccttcaagttttgtgcaataattaagggtcactcactgtcagatactttctgtgatctatgataatgtgtgtgcaacacataacatttcaataaaagtagaaaatatgaaattagagtcatctacacatctggatttgatcttagaatgaaacaagcaaaaaagcatccaagtgagtgcaattattagttttcagagatgcttcaaaggcttctaggcccatcccgggaagtgttaatgagctgtggactggttcacatatctattgcctcttgccagatttgcaaaaaacttcactcaatgagcaaatttcagccttaagaaacaaagtcaaaaattccaaggaagcatcctacgaaagagggaacttctgagatccctgaggagggtcagcatgtgatggttgtatttccttcttctcagtactgcagactatgccatgttcaaggtgggacctgaagctgacaagtaccgcctaacatatgcctacttcgctggtggggatgctggagatgcctttgatggctttgattttggcgatgatcctagtgacaagtttttcacatcccataatggcatgcagttcagtacctgggacaatgacaatgataagtttgaaggcaactgtgctgaacaggatggatctggttggtggatgaacaagtgtcacgctggccatctcaatggagtttattaccaaggtatgttttcctttcttagattccaagttaatgtatagtgtatactattttcataaaaaataataaatagatatgaagaaatgaagaataatttataaagatagtagggattttatcatgttctttatttcaactaagttctttgaaactggaagtggataataccaagttcatgcctaaaattagcccttctaaagaaatccacctgctgcaaaatatccagtagtttggcattatatgtgaaactatcaccatcatagctggcactgtgggttgtgggatctcctttagacatacaacataaatgatctggatggattaacattactacatggatgcttgttgacacattaacctggcttcccatgagctttgtgtcagatacacgcagtgaacaggtgtttggaggaacagaataaagagaaggcaagcactggtaagggcaggggtttgtgaaagcttgagagaagagaccagtctgaggacagtagacacttattttaggatgggggttggatgaggaggctatagtttgctataagcttggaatggtttggaacactggtttcactcacctacccagcagttatgtgtggggaagccttaccgatgctaaaggatccatgttacaataatggcattatttggaaatcccagtggtattccatgaataaaaccactatgaagataatcccactcaacagactctccgttggagaaggacagcaacaccaccctgggaaagccaaacagtcagaccagacctgtttagcatcagtaggacttccctaccatatctgctgggtagatgagtgaaaccagtgttccaaaccactccgggcttgtagcaaaccatagtctcctcatctaccaagatgagcaaccttacctcctgatgtcctagccaatcaccaactaggaaactttgcacagtttatttaaagtaacagtttgattttcacaatatttttaaattggagaaacataacttatctttgcactcacaaaccacataatgagaagaaactctaagggaaaatgcttgatctgtgtgacccggggcgccatgccagagctgtagttcatgccagtgttgtgctctgacaagccttttacagaattacatgagatctgcttccctaggacaaggagaaggcaaatcaacagaggctgcactttaaaatggagacataaaataacatgccagaaccatttcctaaagctcctcaatcaaccaacaaaattgtgctttcaaataacctgagttgacctcatcaggaattttgtggctccttctcttctaacctgcctgaagaaagatggtccacagcagctgagtccgggatggataagcttagggacagaggccaattagggaactttgggtttctagccctactagtagtgaataaatttaaagtgtggatgtgactatgagtcacagcacagatgttgtttaataatatgtttattttataaattgatattttaggaatctttggagatattttcagttagcagataatactataaattttatgtaactggcaatgcacttcgtaatagacagctcttcatagacttgcagaggtaaaaagattccagaataatgatatgtacatctacgacttgttttaggtggcacttactcaaaagcatctactcctaatggttatgataatggcattatttgggccacttggaaaacccggtggtattccatgaagaaaaccactatgaagataatcccattcaacagactcacaattggagaaggacagcaacaccacctggggggagccaaacaggtcagaccagagcaccctgcggaaacagaatatgactcactttaccctgaggatgatttgtagaaaattaactgctaacttctattgacccacaaagtttcagaaattctctgaaagtttcttccttttttctcttactatatttattgatttcaagtcttctattaaggacatttagccttcaatggaaattaaaactcatttaggactgtatttccaaattactgatatcagagttatttaaaaattgtttatttgaggagataacatttcaactttgttcctaaatatataataataaaatgattgactttatttgcatttttatgaccacttgtcatttattttgtcttcgtaaattattttcattatatcaaatattttagtatgtacttaataaaataggagaacattttagagtttcaaattcccaggtattttccttgtttattacccctaaatcattcctatttaattcttctttttaaatggagaaaattatgtctttttaatatggtttttgttttgttatatattcacaggctggagacgtttaaaagaccgtttcaaaagagatttacttttttaaaggactttatctgaacagagagatataatatttttcctattggacaatggacttgcaaagcttcacttcattttaagagcaaaagaccccatgttgaaaactccataacagttttatgctgatgataatttatctacatgcatttcaataaaccttttgtttcctaagactagatacatggtacctttattgaccattaaaaaaccaccactttttgccaatttaccaattacaattgggcaaccatcagtagtaattgagtcctcattttatgctaaatgttatgcctaactctttgggagttacaaaggaaatagcaattatggcttttgccctctaggagatacaggacaaatacaggaaaatacagcaacccaaactgacaatactctatacaagaacataatcactaagcaggagtcacagccacacaaccaagatgcatagtatccaaagtgcagctg

SEQ ID NO: 144 - DNA, 81940 bp, Homo Sapiens
attagaggctcaccgattcatgtcggagatggtcagaaaaaccaactctccataggacgtcgtttcagaagcaaccttgggcttagtcccaccctttttaggcactcttgagaaatcagagtgcctagaaagatgacaactcaagcaccgacgtttacgcagccgttacaaagcgttgtggtactggagggtagtaccgcaacctttgaggctcacattagtggttttccagttcctgaggtgagctggtttagggatggccaggtgatttccacttccactctgcccggcgtgcagatctcctttagcgatggccgcgctaaactgacgatccccgccgtgactaaagccaacagtggacgatattccctgaaagccaccaatggatctggacaagcgactagtactgctgagcttctcgtgaaagctgagacagcaccacccaacttcgttcaacgactgcagagcatgaccgtgagacaaggaagccaagtgagactccaagtgagagtgactggaatccctaaccctgtggtgaagttctaccgggatggagccgaaatccagagctcccttgatttccaaatttcacaagaaggcgacctctacagcttactgattgcagaagcataccctgaggactcagggacctattcagtaaatgccaccaatagcgttggaagagctacttcgactgctgaattactggttcaaggtgaagaagaagtacctgctaaaaagacaaagacaattgtttcgactgctcagatctcagaatcaagacaaacccgaattgaaaagaagattgaagcccactttgatgccagatcaattgcaacagttgagatggtcatagatggtgccgctgggcaacagctgccacataaaacacctcccaggattcctccgaagccaaagtcaagatccccaacaccaccgtctattgctgccaaagcacagctggctcggcagcagtccccatcgcccataagacactccccttccccggtcagacacgtgcgggcaccgaccccatctccggtcaggtccgtgtctccagcagcaagaatctccacatcccccatcaggtctgttaggtctccattgctcatgcgtaagactcaggcatccaccgtggccacaggtcctgaagtgcctcccccttggaagcaagagggctacgtggcctcctcatctgaggctgagatgagagagacaacgctgacaacctctactcagatcaggacagaagagagatgggaagggagatacggtgtccaggagcaagtgaccatcagtggtgctgcgggtgctgccgccagtgtgtcggccagtgctagctacgcagcagaggctgttgccactggtgctaaagaggtgaaacaagatgctgacaaaagtgcagctgttgcgactgttgttgctgccgttgatatggccagagtgagagaaccagtgatcagcgctgtagagcagactgctcagaggacaaccacgactgctgtgcacatccaacctgctcaagaacaggtaagaaaggaagcggagaagactgctgtaactaaggtagtagtggccgccgataaagccaaggaacaagaattaaaatcaagaaccaaagaaataattaccacaaagcaagagcagatgcacgtaactcatgagcagataagaaaagaaactgaaaaaacatttgtaccaaaggtagtaatttccgcagctaaagccaaagaacaagaaactagaatttctgaagaaattactaagaaacagaaacaagtaactcaagaagcaataatgaaggaaactaggaaaacagttgtacctaaagtcatagttgccacacccaaagtcaaagaacaagatttagtatcaagaggtagagaaggcattactaccaaaagagaacaagtgcaaataactcaggagaagatgagaaaggaagccgagaaaactgccttgtctacaatagcagttgctactgctaaagccaaagaacaagaaacaatactgagaactagagaaactatggctactagacaagaacaaatccaagttacccatggaaaggtggacgttggaaaaaaggctgaagctgtagcaacagttgttgctgcagtagaccaggcccgagtcagagagcccagagagcctgggcatcttgaagaatcctatgctcagcagaccactttggagtacggatataaggaacgcatttccgccgcaaaggtagctgagcctccccaacgtccagcctcagaaccccacgttgtccctaaagcagtcaagcctagagtaatccaggctccttctgagactcatatcaaaactactgatcaaaagggaatgcacatatcatcacagatcaagaaaactacagatctaacaacggaaagattagtccatgtggataaacgcccccgcacagctagccctcactttactgtttcaaaaatttctgttcctaagacagaacatggatatgaggcatcaatagccggtagtgctattgccacattacaaaaagagttgtcagccacatcttctgctcagaagatcaccaaatcggtgaaggctcctactgtgaagcccagtgagactagagtaagggcagagcccacacccttgccacagttccccttcgctgacacaccagatacttacaagagtgaagctggcgttgaggtgaaaaaggaagtaggggtgagcatcactggcaccaccgtccgtgaagagcgctttgaagtactgcacggacgcgaagccaaggtaacagaaacagcaagagtaccagcacctgttgaaattcctgttactccaccaactttggtctcgggcttaaaaaatgtgactgtcatagaaggtgaatctgtcaccttggagtgccacatctctggatacccatccccgacagtgacatggtacagggaagactaccaaatcgaaagttccattgacttccagataaccttccagagtggaattgctcgtcttatgattcgcgaagcatttgcggaagacagcgggcgatttacttgcagtgctgtaaatgaggctggaaccgtcagcacatcctgctatctggctgtgcaggtgtcagaagaatttgaaaaggaaaccacagccgtgactgagaaatttactacagaagagaaacgctttgttgagtcaagagatgtggttatgactgatactagcctcacagaggaacaagcagggcctggagaacctgccgcgccttactttattacaaaaccagtggtccagaaactggtggaaggtgggagcgtggtgtttggatgccaagttggcggcaacccaaagccccatgtatactggaaaaaatctggtgttcctctaaccactggatacagatacaaagtgagttacaacaaacaaaccggtgaatgcaagctggtgatttctatgacttttgctgatgatgctggagaatacactattgttgttcgcaataagcatggagaaacttctgcatctgcttccttgcttgaagaagctgattatgagttactgatgaagtcccagcaagaaatgctttatcagacacaagtgactgcatttgttcaagaacctgaagttggagaaacagcacctggatttgtatactctgagtatgaaaaagagtatgaaaaagaacaagccttaattaggaagaaaatggccaaagatactgtagtggtcagaacttatgtagaagatcaggaattccatatttcttcctttgaagagagacttattaaagaaattgaatatagaataataaagactacattagaagaacttcttgaagaagatggagaagaaaagatggcagttgacatttctgaatctgaagctgttgaatcaggatttgatttaagaatcaagaattatagaattcttgaggggatgggtgtcacttttcattgcaagatgtctggatatccattaccaaagattgcttggtacaaagatggcaagcgcatcaaacatggagaaagataccaaatggactttctacaagatggcagagctagtctgcgtatacctgttgttcttccagaagatgaaggaatctacactgcatttgccagcaatattaaaggaaatgcaatttgctcagggaaattgtatgtggagcctgctgcaccacttggagctccgacttacattcccacactagagccagtgagcagaatcagatctctctctccacgttcagtgagcaggtctcctatacgcatgtctcctgcacggatgtcacctgcaaggatgtctcctgcacggatgtcccctgcaagaatgtcccctggacgtaggctggaggagacagatgagtcacaacttgagagactatataaaccagtctttgtgttaaaacctgtttctttcaaatgtttagaaggggcaaactgcagatttgacttaaaggttgttggtagacctatgccagagacgttctggtttcatgatggccagcaaattgtcaatgactatacccataaagtagtcattaaagaagatggtactcaatcactaattattgtccctgccacacccagtgattctggggaatggactgtggttgcccaaaacagggcaggcagatcttcaatttcagtgattttaactgtggaagctgtggaacatcaggtaaaaccgatgtttgtagaaaaactgaaaaatgtcaatataaaggaaggttcccgacttgaaatgaaagtcagagctacgggtaaccccaaccctgacattgtatggttgaaaaacagtgacatcattgtgcctcataaatatcccaaaatcagaattgaaggaaccaagggagaagctgcccttaaaatcgattccactgtcagccaagattctgcctggtatactgcgactgctattaataaagctggcagagacactacaagatgcaaagtaaatgttgaagttgagtttgcagagcctgagccagagagaaagttaatcatcccacgggggacatatagagcaaaggagattgcagccccagaactggagcccctccatttgcgatatggccaagagcaatgggaagaaggtgatctctatgacaaagagaaacaacagaaaccatttttcaagaaaaaactcacttccttaagacttaagcgctttgggcctgcccactttgaatgcaggctaacacccattagtgacccaacgatggtggtggagtggctccatgatggaaagccacttgaagcagccaacaggctccgtatgatcaatgaatttgggtactgcagccttgattatggcgttgcatattctagagacagtggtatcattacttgcagagccactaacaaatatggaacagatcacacatctgctacccttattgttaaagatgagaaaagtcttgtggaagaatcccaattgcctgaggggaggaaaggcttacagagaattgaagaattagagagaatggctcatgaaggtgcacttacaggtgtaacaacagatcagaaagaaaagcaaaagccagacattgtcttgtacccagagccagttagagtacttgaaggggagactgcaaggttccgctgcagggtaacaggctaccctcagcccaaagtcaactggtacctcaatggacagctcatccgcaaaagcaaaaggttcagagttcgctatgatggtatccattacctggacatcgtggactgcaaatcatatgacacaggtgaagtgaaggtcaccgcggaaaatcctgaaggtgtgatagagcataaagtgaagcttgagattcaacagagggaagattttaggtctgtccttaggagagctcctgaaccaaggcctgagtttcacgtacatgaaccaggaaagcttcagtttgaagtacaaaaagtggatagacctgttgacaccactgaaaccaaagaagttgtgaagttgaaaagggctgaaagaattacccatgaaaaagtgcctgaagagtcggaagagctgcgcagtaaattcaagcgcagaacagaagagggctattatgaagccattaccgctgtggagctcaagtctcgaaagaaggatgaatcctatgaggaactcctcaggaagacaaaagatgaacttctccactggaccaaagagttaactgaagaggaaaagaaagctcttgccgaagaaggcaaaatcacgattccaacttttaaacctgacaagattgaactaagtcctagtatggaggctccaaaaatcttcgaaagaatccagagccaaacagtgggccaaggatctgatgcacacttccgggtcagagtcgtggggaaaccagaccccgaatgtgaatggtacaaaaatggtgtcaaaattgaacggtctgaccggatctactggtactggcccgaagacaatgtttgtgaattggtcataagagatgtgactgctgaggactctgccagcatcatggtaaaagccatcaacatagctggagaaacctccagtcacgcattcttacttgtccaagccaagcaattgatcactttcacacaggaattacaagatgttgttgctaaggaaaaagacactatggcaacctttgaatgtgaaacttcagaaccatttgtcaaagtgaaatggtataaagatggtatggaggttcatgagggagataaatacaggatgcactctgacagaaaggttcacttcctctccatactgaccattgatacgtctgatgctgaagattacagctgtgtacttgtggaagatgaaaatgtcaaaacgactgctaaacttattgttgaaggtgcagttgttgagtttgtgaaagaacttcaggacatagaagttccagaatcatattcaggagaattagagtgcattgtatccccagaaaatatagaaggaaaatggtatcataatgatgtggagcttaaatccaatggcaaatatacaattacatctcgtcgtggacgtcagaacctcacggtcaaggatgtaaccaaggaggaccagggagaatacagctttgtcatcgacgggaaaaagacaacctgtaaattaaagatgaaaccccgccccattgctatcctacaaggacttagtgaccaaaaagtctgtgagggtgacattgttcagcttgaagttaaagtctccttggaaagtgtggaaggcgtctggatgaaagacggccaagaagtgcagcccagtgacagggttcacattgtgatagacaaacaatctcatatgctgctcattgaagacatgactaaggaagatgctggaaattactctttcaccattccagcccttggcctctccaccagtgggcgtgtctctgtctatagtgtggacgtgataacacctctaaaagatgttaatgtgattgaaggcaccaaggctgtgcttgaatgtaaggtgtcagtccctgatgtgacttctgttaagtggtacttaaatgatgaacaaatcaagcctgatgaccgtgtacaggccattgtgaaaggtactaaacagcgactagtcattaaccgaactcatgcttcagacgaaggaccttataagctgatagttggcagagttgaaaccaactgtaatctctctgtagaaaaaattaaaattatcagaggtcttcgtgaccttacctgtacagaaactcaaaatgtggtgtttgaggttgagctgtcccactctggaattgatgtcctgtggaattttaaggacaaggaaatcaagcccagttctaaatataaaattgaagcacatggaaaaatatataaattgacagttctaaatatgatgaaagatgatgaaggaaaatacacattttacgcgggagaaaatatgacatctggaaaacttactgtggcaggtggggccatctccaagccactcacagatcagaccgtagctgaatcccaggaagctgtgtttgaatgtgaagttgccaacccagattccaaaggcgaatggttgagggatggcaaacacctaccactgactaacaacatcagaagtgagtctgatggccacaaaaggagacttatcattgctgccaccaaattagatgacattggagaatatacctacaaggtggccacctccaaaacatctgccaaactcaaagttgaagctgtcaaaattaagaagactctgaagaacctcacagtgacagaaacacaggatgctgttttcactgtcgagcttacacaccctaatgtcaaaggtgtccagtggatcaaaaatggagttgtgctggaatccaatgaaaagtatgctatctctgtcaaaggaacaatttactctctgaggattaaaaactgtgccatcgtggatgagtctgtttatggcttcaggcttggaaggcttggagccagtgccagactgcacgtggagactgtcaagatcattaaaaagccaaaggatgtgacagccttggaaaatgccactgttgcctttgaagttagtgtttcccatgacactgttccagtaaaatggttccataagagtgtggaaattaagccaagtgacaaacacagactggtctcagaaaggaaagtccacaagctgatgctgcagaacatctccccctcagatgctggggaatacacagctgtggtcgggcaattggaatgcaaagcaaaactgtttgtggagacattacatattacaaaaaccatgaaaaatatcgaggtgcctgagaccaaaactgcctcttttgagtgtgaggtgtcccacttcaatgtcccttccatgtggctgaagaatggtgtggaaattgagatgagtgaaaagttcaagatagttgtgcagggaaaactccatcagctgatcatcatgaacaccagcacagaggactcggcagaatacacatttgtctgtggcaatgaccaagtcagtgccaccctgacagtcactccaatcatgattacttccatgctgaaagacatcaacgctgaagaaaaagacactattacttttgaggtgacagtgaactatgaaggcatctcttacaaatggttaaagaatggtgtggaaatcaaatcaactgacaagtgccagatgagaaccaaaaagctcacacactcactgaacatcaggaatgttcactttggggatgctgctgactacacctttgtggctggaaaagcaacatcaacagccacactttatgtggaagctcgtcatatagaatttaggaaacacattaaggacattaaggtactggagaagaagcgagccatgtttgaatgtgaagtttctgaacctgacatcactgtacagtggatgaaagatgaccaggaactgcagatcacagacagaataaagattcagaaggagaaatatgtccaccgccttctgatcccatccacccggatgtctgatgctgggaagtacacagtggtggcaggaggcaacgtgtcaactgcaaaactctttgtagaaggcagagatgttcgcatccgaagtattaaaaaggaggttcaggtcattgagaaacagcgtgctgttgttgaatttgaggtcaatgaagacgatgttgatgcccactggtataaagatggcattgaaatcaatttccaagttcaagaacgacacaaatatgtagtggaaagaagaatccaccgaatgtttatctctgagaccagacagagcgatgcaggagaatacacctttgtggcaggaaggaacaggagttctgtcactctctatgtcaatgctcctgaaccgccccaagttctgcaggagctccagcctgtcactgtgcagtctggcaagcctgcccgcttctgtgccatgatatccggaagaccacagcccaaaatttcctggtacaaggaagagcagctgctttccactggcttcaagtgcaaatttcttcatgatgggcaagagtacacgcttttgctaattgaagccttcccagaggatgcggcagtctatacctgtgaagccaagaatgactatggtgttgccacaacatcagcttcactctcagtggaagttccagaagttgtgtctcctgatcaggaaatgcctgtttatccacctgccatcatcaccccgcttcaggacactgtcacttctgaagggcagccagcccgttttcaatgccgggtttctggaacagatctaaaagtgtcgtggtacagcaaagacaagaaaatcaagccatctcggttctttagaatgactcaatttgaagacacttatcaactggaaattgccgaagcttatccagaagatgaaggaacttacacgtttgttgctaataatgctgtaggccaagtatcaagcacagccaacctgagtctggaagctcctgaatcaattttgcatgagaggattgaacaagagattgagatggaaatgaaagagttttctagttcttttctgtctgccgaggaagaaggacttcatagcgccgaacttcaattatctaaaataaatgaaacacttgaacttttgtctgaatctccagtttacccaactaaatttgattccgaaaaggaaggcactggcccaattttcatcaaagaagtgtcaaatgctgatataagcatgggggatgtggctacactgtctgtaactgtcattggcatccccaaacctaaaattcagtggttctttaatggagtgctattaaccccttctgctgactacaaatttgtttttgacggtgatgatcatagcctgatcattctgttcaccaaattggaggatgagggagagtatacatgtatggccagtaatgactatggaaagacaatatgtagtgcctatctaaaaattaattccaaaggagagggtcacaaagacactgaaacagaatcagcagtggcaaaatctctggaaaagctgggaggtccttgtcctcctcacttccttaaggagttaaaaccaattcgctgtgctcaagggcttcctgccatctttgagtacacagtggttggagagcctgcccctactgttacatggttcaaagaaaacaagcagctttgcaccagtgtttattacactatcattcataaccctaatggctctggaactttcattgtcaatgaccctcagagggaagacagtggcctctatatctgtaaagcagagaatatgttgggtgagtccacctgtgcagcagagctgcttgtgcttctggaagacacagacatgactgataccccctgcaaagcaaagtccacaccagaggctcctgaggattttccacagacacccttaaagggtcccgcagttgaagcacttgactcggagcaggaaattgcaacgtttgtaaaagacaccattttgaaagctgctttaattacagaagaaaaccagcaactatcttatgagcatattgctaaagccaatgaattgagcagtcagcttcctttgggagctcaggaattgcaatccattttggagcaagacaagctcactcctgaaagcaccagggaatttctttgcatcaatggcagtattcactttcagcctctcaaggaaccatctcccaacctacagctgcagattgtacagtcccagaaaaccttctccaaagaaggtattctaatgcctgaagagcctgagacacaggcagttctatcagataccgagaaaatcttcccaagtgccatgtccatagaacaaattaattcattaacagttgagcctctgaaaactttattagctgaacctgaagggaattatccacagtcttcaatagaacctccaatgcattcttatctaacctctgtggctgaggaagtactttcactaaaagaaaagacagtatctgacaccaacagagagcaaagagtgactcttcaaaagcaagaggcacaaagtgcgctcatcttgagtcagagcttagctgagggacacgtggagagtctccagagtcctgatgtcatgatctctcaggtaaactatgagcccctagtcccttcagaacactcatgcacagaaggaggtaaaattttgatagaaagtgcaaatccactggaaaatgcagggcaagattctgcggtcagaattgaggaaggcaagtccttaagatttccactagcacttgaagaaaagcaggtactgctcaaagaagagcattctgacaacgtggtgatgcccccagaccaaatcattgagtctaaaagagagcccgtggcaataaagaaagtgcaggaggtacagggaagggaccttctttctaaggaaagcttgctttctggtattccagaagagcagagattaaacctgaaaattcaaatctgccgggctttgcaagcagccgtggccagcgagcagccaggtcttttctctgagtggctaagaaatattgaaaaggtggaggtcgaggctgtaaacatcacccaagagcccagacacatcatgtgcatgtaccttgttacttcggcaaagtctgtaacagaagaagtaaccatcattattgaagatgttgatcctcaaatggctaacctgaaaatggaacttagggatgctttgtgtgctattatatatgaggaaatagacatcctaacagctgagggtcctagaattcagcaaggagccaaaacaagtttgcaagaagaaatggattctttttcaggttcacagaaggttgaacccattactgaaccagaagttgaatctaaatatctgatctcaactgaagaggtcagttattttaacgtgcaaagtagggttaaatatttggatgccacacctgtcactaaaggggttgcttcagctgttgtctctgacgaaaaacaagatgagagtctgaaaccatcagaggaaaaagaggagtcttcctctgaaagtggtactgaggaggttgctacagtaaagatacaggaagctgagggtggcttaatcaaagaggatggccccatgatacatacacctttagtggacactgtttctgaggaaggtgatattgtacacctcacaacatccataacaaatgctaaagaggtgaattggtattttgagaataaactggtgccttcagatgaaaagttcaagtgtttacaagatcaaaatacatatacgctagtcatcgacaaagtaaataccgaagaccatcaaggagagtatgtctgtgaggccttgaatgacagcggaaaaacagcaacttcagccaaactcactgtagtaaaaagagctgccccagtgatcaagaggaaaatcgaacccctggaagtagcactgggccacctagccaaattcacctgtgagatccaaagtgctcccaatgtccggttccagtggtttaaagctggccgagaaatttatgagagtgacaagtgttctattcgatcttcaaagtatatctccagccttgaaatcctgagaacccaggtggttgactgcggcgagtatacatgcaaagcttccaatgagtatggcagtgtcagctgtacagccacactaactgtgacagtgcctggaggtgaaaagaaagttcgcaaattacttccggaacgtaaacctgaaccaaaggaagaagttgttctgaaaagcgttctaagaaaaagacctgaagaagaagaacctaaagtagaacctaaaaaactagaaaaagttaaaaaacctgcagtaccagaaccaccacctccaaaacctgttgaagaggttgaagtacctactgttacaaaaagggaaaggaagattcctgaaccaacaaaagtgcctgaaatcaagccagcaatacctctccctgcacctgaaccgaaaccaaagcccgaagcagaagtgaaaacaatcaaaccacctcctgtggaacctgaaccaacccccatcgctgccccagtaacagtgccagtggttggaaagaaagcagaagccaaagcacctaaggaagaggctgccaagccaaaaggtcctatcaaaggtgtacccaaaaagactccttcaccaatagaagccgaaaggagaaagttaaggccaggaagtggtggagagaaacctcctgatgaagccccgttcacctaccagctaaaggctgtgccactgaagtttgtgaaagaaatcaaagacatcatcttgacagaatcagagttcgttggctcttcagcaatctttgaatgtttggtctccccttccactgcaattacaacctggatgaaagacggtagcaatatccgtgagagtcccaagcacaggtttattgcagatggtaaagacagaaagctgcacatcattgatgttcaactttccgatgctggtgaatacacctgtgttttacgtttgggaaacaaagaaaagacctccacggctaaacttgttgtagaagaacttcctgtgcgttttgtaaaaacactggaagaggaagtcacagtggtcaaaggacagccattgtacttgagctgcgagttaaacaaagagcgtgacgtggtctggaggaaggatggcaagattgtggtggagaaacctggccgaattgtgccaggcgtcattggcttgatgcgggctctgaccatcaacgatgcagatgacacagatgctggaacatacacagttactgtggaaaacgccaacaacctggagtgttcatcttgcgtaaaagtagtagaagtcattagagattggctggtgaaacctatacgagaccagcatgtgaaacccaaggggacagctatttttgcctgtgatatagcaaaagatactccaaacattaagtggttcaaaggatatgatgaaatccctgcggaaccaaatgataagactgaaatactgagagatggaaatcatctgtacctcaaaattaagaatgctatgccagaagatattgctgagtatgcagtggaaattgaaggaaaaagataccctgcaaagctgacacttggagagcgtgaagttgaactgcttaaaccaatagaggacgttaccatttatgagaaagaaagtgcaagctttgatgcagaaatctcagaggcagacattcctggacaatggaaactgaaaggagaacttctaaggccctcacctacttgtgaaatcaaagcagaaggtggaaaacgcttcttaactttgcacaaagtcaaactggaccaagctggtgaagtcctctaccaggcccttaatgcaattacaactgccattttgacagtaaaagaaatcgaacttgactttgctgtgcccctgaaggatgtcactgttccagaaaggcgacaggctcgattcgaatgtgtcctcacccgagaggcaaatgttatatggtccaaaggacctgatataattaagtcatctgacaaatttgatatcatcgctgatggaaagaaacatattcttgttattaatgattctcaatttgatgatgaaggggtctatactgctgaggtggagggcaagaagacctcagctcggttgtttgtcacaggtataagactgaaattcatgtcacctcttgaagatcaaacagtaaaagaaggtgaaacagcaacttttgtttgtgaactttctcatgaaaaaatgcatgtagtctggttcaaaaatgatgccaaactccatacaagcagaacagtactcatctcttctgagggcaagactcacaaattggaaatgaaagaagtgacattggatgatatatctcagataaaagctcaagtcaaggagctgagctccacagcacagctgaaggtcttagaggccgatccctacttcactgtgaaattacatgacaaaactgcagtggagaaggatgagattactttgaagtgtgaagtgagcaaagatgtaccagtgaaatggttcaaagatggtgaagagattgtcccttcacccaaatattctatcaaggcagatggcctgcgccgcatcttaaaaatcaaaaaggcggaccttaaagataaaggcgaatatgtgtgtgactgtggcacagacaagaccaaggcaaatgttactgttgaggctcgactaatagaagtggaaaagcctctgtacggagtagaggtgtttgttggtgaaacagcccactttgaaattgaactttctgaacctgatgttcacggccagtggaagctgaaaggacagcctttgacagcttcccctgactgtgaaatcattgaggatggaaagaagcatattctgatccttcataactgtcagctgggtatgacaggagaggtttccttccaggctgctaatgccaaatctgcagccaatctgaaagtgaaagaattgcctcttatcttcatcacacctctcagtgatgttaaagtcttcgagaaagatgaggctaagtttgagtgtgaagtatccagggagcccaaaacattccgttggctaaaaggaacccaggaaatcacaggtgatgacagatttgagcttataaaggatggcactaagcattcaatggtgatcaagtcagctgcttttgaagatgaagcaaaatacatgtttgaagctgaagataagcacacaagtggcaaactgatcattgaaggaatccggctcaaattcctcacccctctcaaagatgtaactgccaaagagaaggaaagtgctgtatttactgtggagttatctcatgataacatccgagttaaatggttcaagaatgaccagcgcctacacaccaccaggtcggtctcaatgcaagacgaagggaaaactcattcgatcacattcaaagacctgtctattgatgacacctcccaaattagagtagaagctatggggatgagttcagaagctaaactcactgtgcttgagggagacccatattttacaggaaaacttcaagattatactggtgtagagaaagatgaagttattctacagtgtgaaattagcaaagcagatgcaccagtgaaatggtttaaggatgggaaggaaataaagccatccaaaaatgctgttattaagacagatggcaagaaacgcatgctaatcctaaagaaagccttgaaatcagatattggacagtacacctgtgactgtgggacagataagacctcaggaaaacttgacattgaggatcgggaaattaaactggtgcgacccctgcacagtgtggaggtgatggagactgagacagcacgctttgaaaccgaaatctctgaagatgatatccacgccaactggaaactcaagggagaggccctactccaaacacctgattgtgaaattaaggaagaaggcaaaatacactcccttgttttgcacaactgtcgcctggaccagacgggtggggtggatttccaagctgccaatgttaaatctagtgcccacctccgagttaagccacgagtaattggtcttctgaggcctttaaaggatgtcaccgtgactgcaggggaaacagccaccttcgactgcgagctctcctacgaagatatcccagtggaatggtatctcaaagggaagaaactagagcccagcgataaggtggtcccacgttcagaaggaaaagttcatacacttactctgagggatgtaaagttagaagatgctggggaagtccaactaacagcaaaagatttcaaaactcacgccaacctctttgtgaaagaacccccagttgaattcactaagcctcttgaggaccagacggtcgaagagggagccactgcagtgctggagtgtgaagtctccagagaaaatgctaaggtgaaatggttcaaaaatgggacagaaatcctcaaaagcaagaagtatgaaattgttgctgatggcagggtcagaaaacttgttatacatgactgtaccccagaggatattaaaacatacacttgtgatgctaaggattttaagacttcctgtaacctgaatgtcgtgcctcctcatgtggaattcttaagaccactcaccgaccttcaagttagagaaaaagaaatggctcgatttgagtgtgaactttcccgagaaaatgctaaggttaagtggtttaaagatggtgctgaaattaaaaagggcaaaaaatatgacatcatatccaagggagcagtgcgcattcttgtcatcaacaaatgtctactggatgatgaagctgaatattcctgtgaagtaaggacagcgagaacttctggcatgctgacagttctggaagaagaagctgtctttaccaaaaatcttgccaacattgaagttagtgaaacagacactataaaactggtttgtgaagtctccaaacctggcgcagaagtgatttggtataaaggggatgaggagatcattgaaacaggaagatatgaaatactgactgaaggacggaagagaatcctggtcattcagaacgctcaccttgaggatgctggcaactacaactgtcgactcccaagctctcgaaccgatggcaaagtcaaagtacatgaactggctgctgaatttatctcaaagcctcaaaaccttgaaatacttgaaggagaaaaggctgaatttgtctgctctatatcaaaagaaagctttccagtccagtggaagagggatgataagacacttgaatctggagataaatatgacgttattgctgatggtaaaaagagggtcctagttgtgaaagatgccacattacaagatatgggcacttacgttgtcatggtaggggccgccagagcagcagctcacttgacagtcattgaaaaactcaggatcgtagttcctcttaaggacacccgggtgaaggaacaacaggaagttgtcttcaactgtgaagtcaatactgaaggtgccaaagccaaatggttcagaaatgaagaagctatatttgatagttcaaaatacatcattctccaaaaagacctagtctacaccctcagaattagagatgcacacttagatgaccaagccaactataatgtgtctttgaccaatcacagaggtgaaaatgttaaaagtgcagccaatctaatagtagaagaggaagaccttaggattgttgagcctcttaaagatattgaaacaatggagaagaaatctgtcacattctggtgcaaggtgaatcgtctcaatgtaacactgaagtggaccaaaaatggtgaagaagtgccttttgacaaccgtgtctcatacagagttgataagtacaagcacatgttaaccattaaagactgtggcttcccagatgaaggtgaatacattgtcactgctggacaagataaatctgttgctgagcttctcatcatagaagccccgacagaatttgtggaacacttggaagatcagacagtcactgagttcgatgacgctgtcttctcctgccagctctccagagagaaagccaatgtaaaatggtacagaaatgggagagaaatcaaagaaggcaaaaaatacaaatttgaaaaagatggaagtatacacagactcattataaaagattgcaggctggatgatgagtgtgaatatgcttgcggggtagaagacaggaagtctcgtgctagactttttgtggaagaaattcctgttgagatcatcaggcctccacaagatattcttgaagcccctggtgctgatgttgtctttttagcagaactcaataaagataaggtggaagtccaatggctaagaaataacatggttgttgtccagggtgataaacaccagatgatgagtgaaggaaagatacatcgactacagatttgtgatattaagccccgtgaccagggtgaatacagatttattgccaaagacaaagaagccagagctaagcttgaactggcagctgcaccaaaaatcaagacagctgaccaagaccttgtggttgatgttggcaagcctctgacaatggtggtgccatatgatgcctaccccaaagcagaagctgaatggtttaaagaaaatgaacctttatctacaaaaaccattgatactacggctgaacaaacttctttcagaattttagaagccaagaaaggagacaaagggaggtataaaattgtgcttcagaacaaacatggaaaagcagaaggattcatcaatttaaaagttattgatgttcctgggccagtacgtaacttagaagtgacagaaacatttgatggtgaagtgagccttgcttgggaagaacctttaactgatggtggaagcaaaatcataggttacgttgttgaaagacgtgacattaagagaaagacctgggttctggccacagaccgtgcagagagttgtgagtttactgtcactggtctacagaaaggaggagttgagtacctattccgtgtgagtgcaagaaacagagttggcactggtgagccagtagaaactgacaatcctgtagaagcaaggagtaaatatgatgttccaggccctcctttgaatgtaaccatcactgatgtgaatcgatttggtgtctcactgacatgggaaccaccagagtatgatggaggtgctgagatcacaaactacgtcattgaattaagagacaagacttctatcaggtgggatactgccatgactgtgagagctgaagacctgtctgcaactgttactgatgtggtagaaggacaggagtacagtttccgagtgagagcccaaaatcgaattggagttggaaaaccaagtgcagccacacccttcgtcaaagttgctgatccaattgagagaccaagtcctcctgtaaacctaacttcctcagatcagactcagtcatcagttcagctcaaatgggaacctcctctgaaagatggaggaagcccaatattaggctatataattgagcgatgcgaagaaggaaaagataattggattcgttgcaatatgaaacttgtccctgaactgacttacaaggttaccggattggaaaaaggaaataaatatttatatagagtatctgcagaaaataaagctggtgtttcagatccatctgaaattcttggtcctctcaccgctgacgatgcatttgttgaaccaacaatggatttaagtgcatttaaagatggtctggaagttattgtcccaaatcctatcacgatcctggttccaagtacaggctatccaaggccaactgcaacctggtgttttggagataaagtactagaaacaggggaccgggtgaaaatgaagaccttgtctgcctatgccgaacttgtcatttctccaagtgaacgttcagacaagggcatttatacactgaaattagaaaaccgtgtgaaaacaatttctggggaaattgatgtcaatgtaattgctcgcccaagtgcacccaaagaattgaaatttggtgatataaccaaggactcagtacatttgacttgggaaccacctgatgatgatggaggaagtccgttaactggatacgttgttgaaaaacgagaagtcagccggaaaacatggactaaagttatggactttgtgactgatctagaattcacagttcctgatcttgttcaaggaaaagagtacttatttaaagtttgtgctcgtaacaaatgtggccctggagaacctgcatatgttgatgaacctgtaaatatgtcaactcctgcaacggtacctgacccaccagagaatgttaaatggagagatcgaacagccaatagcatcttcttaacatgggatccacctaaaaatgatggtggttcacgcatcaaaggatatatagttgaaagatgtccacgtggttctgataaatgggttgcctgtggagaacctgttgcagaaacaaaaatggaagtgacaggtcttgaggaaggcaaatggtatgcctaccgcgtgaagaccttaaacaggcagggtgctagcaaaccaagcagacccacagaggaaatccaggctgtggacacacaagaggccccagaaatcttcctcgatgtgaagctccttgctggtctcactgtaaaagctgggaccaagattgaacttcctgccaccgtaaccggaaaacctgaacctaaaataacttggacaaaggctgatatgattctgaagcaggacaaaagaattaccattgaaaatgtccctaagaaatccacagtgactattgttgatagtaagagaagtgacactggcacatatatcattgaggctgtgaatgtgtgtggccgggccactgctgtggtggaagtgaacgtcttagataaacccggaccaccagctgcctttgacatcacagatgtaaccaatgagtcatgtcttctaacatggaacccaccacgcgatgatggtggatctaagatcacaaactatgttgtggagagacgagcaactgatagtgaagtgtggcacaagctctcatccaccgtcaaggatacaaacttcaaggccaccaaattaatccccaataaagagtacatcttcagagttgctgcagaaaacatgtatggtgctggtgaaccagttcaggcctctccaataacagccaaatatcagtttgatccacctggtcctccaactcgcctagaaccttctgatatcactaaagacgcagtgactctcacatggtgtgagccagatgatgatggtggcagcccaatcacaggatactgggttgaaagactggatcctgatacagataaatgggttagatgcaataagatgccagtaaaggacacaacatacagagtgaaaggtctcactaataagaaaaaatacagattccgtgtgttggctgaaaatcttgctggacctggaaaaccaagcaaatcaactgaaccaatcttaataaaggatcccatagatcctccatggccccctggaaaaccaactgtaaaagatgtaggcaaaacatcagtaaggttgaattggacaaaaccagaacatgatggaggtgcaaagattgagtcttatgtcattgaaatgctgaagactggaacagatgagtgggtcagagtggcggaaggggttcccaccactcagcacttgctcccagggctcatggaaggacaggaatactcattccgagttagagctgtgaataaggctggggaaagtgaacccagtgaacccagtgaccctgtgctttgccgggagaagctatatcctccatcaccaccacgctggcttgaagttattaatatcacaaaaaatacagcagacctaaaatggacagttcctgagaaagatggagggtcccccatcaccaactacattgtggaaaagagagacgtcaggcgaaaaggctggcaaacagtggataccactgtcaaggacaccaagtgcacagtcaccccactgactgagggctctttatatgtgttccgagttgctgcagaaaatgctataggacaaagcgactacaccgaaattgaggactctgtgctggccaaagacacctttaccactcctggaccaccctacgccctggcagtggttgatgtgacaaaacgacatgttgacctaaagtgggagccacctaaaaatgatggtggaagaccaatacagagatatgtcattgagaagaaagaaaggttaggtacccgttgggtgaaagctggaaagactgcaggacctgactgtaacttcagagtaactgatgtcatcgaaggaacagaggtccagtttcaggttcgggctgaaaatgaagctggagttggccacccaagtgaacccacagaaatcctatccattgaagatccaacaagtcctccctcaccaccccttgacctacatgtgactgatgctgggagaaaacacattgccattgcttggaagcctccagagaaaaatggtggaagtcctatcataggataccatgttgaaatgtgtccagtaggcactgagaaatggatgagagttaattctcgcccaataaaggacttgaaattcaaggttgaagaaggtgttgttcctgacaaagaatatgtcctgagagtgagagcagtcaatgctattggtgtcagcgagccatctgaaatctctgaaaatgtggttgccaaagacccagactgcaagccaacaattgacctggagactcatgacattattgttattgaaggtgaaaagttaagcattcctgttcccttcagagctgtcccagttccaactgttagttggcataaagatggcaaagaagttaaagcaagtgatagattaacaatgaagaatgatcacatctctgcacaccttgaagttcccaagagtgtccgtgcagatgccggaatttataccattacactggagaataagctcggctcagcaacagcctcaatcaatgtcaaagtcataggcctacctggaccatgcaaagatattaaagcaagtgacattaccaagagttcttgtaagttaacttgggaacctccagaatttgatggtggaaccccaattcttcattatgtcctggagcgcagagaagctgggaggagaacatatataccagtcatgtctggtgagaacaaactgtcatggactgtgaaggatctcataccaaatggtgaatacttcttccgtgttaaagcagtcaacaaggttggtggaggagaatatattgaactgaaaaatccagtcattgctcaagatccaaagcaaccccctgatccacctgtagatgtagaggttcataatcctacagcggaggcaatgactattacatggaagccacctttgtatgatggagggagcaagataatgggctacatcatagagaagattgctaagggtgaagaaaggtggaagagatgcaatgaacacctggtaccaatcctgacctatacagcaaaaggacttgaagaggggaaagagtaccaattccgtgtgcgagcagagaacgccgcgggtattagtgaaccttctcgggctactcctccaaccaaagctgtagatcccattgatgcccccaaagtcattctgagaacaagcctagaagtgaaacgaggtgatgaaatagcacttgatgcaagtatttctggatcaccttacccaactattacatggataaaggatgaaaatgttattgtaccagaggaaattaagaagcgtgcagcacccttggttaggagaaggaagggtgaagttcaagaagaagaaccatttgtcctgcctctgacacagcgtttgagtattgacaacagcaaaaagggagaatctcagctacgcgtccgagattctctccgacctgaccatggtctgtatatgatcaaagttgaaaatgaccacggtattgcaaaagctccttgtactgtcagtgtgttagatacaccgggaccaccaatcaactttgtatttgaagatatcagaaagacctcagtcctttgtaaatgggaaccaccccttgatgatggtggcagtgaaatcataaactacactttggaaaagaaagacaagacaaaacccgactcagaatggattgttgtcacttcaacacttagacattgcaaatattcagtaacaaaactgattgaaggaaaagagtacctcttccgtgtaagagctgaaaacagatttgggccaggtccaccatgtgtttcaaagccacttgtggctaaagatccatttggaccacctgatgcaccagataagcccattgtggaagatgttaccagcaacagtatgctagtgaaatggaatgaaccaaaagataatggaagccccattttgggttactggcttgaaaaacgtgaagttaacagtacacattggtctcgtgtcaacaaaagccttctgaatgccttgaaagccaatgtagatggcttattagaaggactcacctatgtcttcagagtatgtgctgaaaatgcagctggacctggaaagttcagtccaccttcagatcccaaaacagcacatgatccaatctctcctcctgggccacctatcccaagagtcactgacacaagctctacaactattgaactagaatgggaacccccagctttcaatggtggtggggaaattgttggctattttgttgataagcagttggttggcacaaataaatggtcacgctgcacagagaagatgatcaaggtccgtcagtacaccgtcaaagaaatccgagagggtgctgattacaaacttcgggtgagtgctgtcaatgccgcaggggaaggaccgcctggagaaacacaacctgttactgtggctgaaccacaagagcctccagctgtggaactggatgtttctgtcaagggtggaatacaaataatggctgggaagactcttagaattccagctgtggtgactggtcgccctgtacctacaaaagtatggaccaaagaagaaggggagctggataaagaccgtgttgtaatagacaacgttggaaccaaatctgaactaattatcaaggatgcactgcgaaaagaccatggcagatatgtgattacagctacaaatagctgtggttccaaatttgcagcagccagggtagaagtttttgatgtccctggtccagttcttgacttaaaacctgttgtaacaaacagaaaaatgtgtctacttaactggtctgatccagaagatgatggaggaagtgaaataacaggctttatcattgaaagaaaagatgccaagatgcatacttggagacaaccaatagagactgagagatctaaatgtgacatcacaggtctgcttgagggacaagaatataagttccgtgttattgccaagaacaagtttggctgtggccctcctgttgaaataggaccaattcttgcagttgatccactaggtcctccaacatctccagagaggctcacatacactgaaagacaaaggtccactatcacacttgactggaaagagccccgcagtaatggtggcagtcccatccaaggatatatcattgaaaaacggcgtcatgacaaacctgactttgaaagagttaacaagcgactctgcccaaccacatcttttctggttgaaaatcttgatgaacaccaaatgtatgagttccgtgtcaaagctgtcaatgaaattggtgaaagtgaaccatccctacctcttaatgtagtcatacaagatgatgaagtgcctccaactattaagttgcgtctgagtgttcgaggagacactatcaaagttaaggcaggagagcctgtccacatccctgcagatgtgacaggccttccaatgcctaagattgaatggtccaaaaatgaaactgtaattgaaaaacccactgatgcacttcagataaccaaggaagaggtatcccgaagtgaggcaaaaactgagcttagcattcccaaagcggtccgggaggacaaaggcacttacacagttactgcttccaatcgccttggctcagtgttccgaaatgttcacgttgaagtatatgaccgcccatccccaccaagaaatcttgctgttactgacattaaagctgaatcttgctacttgacatgggatgcccctcttgataatggtggcagtgaaatcacccattatgttattgacaaacgtgatgcaagtaggaagaaagcagaatgggaggaagtcaccaacactgctgtagagaaaagatatgggatctggaaacttatccccaatggtcagtatgagttccgagtcagggcagtgaataaatatggaatcagtgatgagtgcaaatcagataaagtagtcattcaagatccttatcgccttcctggacctccaggaaaaccaaaagttttggcacgcaccaaaggatcaatgctagtgagctggactcctcctttggacaatggtggctctccaattactggctactggctggagaaaagagaagagggaagtccttattggtcacgtgttagccgagcaccaataaccaaagtgggattgaaaggcgtggaatttaatgttcctcgtttgcttgaaggcgttaaataccagttcagagccatggcaataaatgctgcaggaattggtcctcccagtgaaccatcagatccagaggttgcaggagatcccatatttccaccggggccaccttcttgcccagaagttaaagataaaacgaagtcaagcatctcactaggatggaaacctccagccaaagatggtggcagcccaatcaaaggatacattgtagaaatgcaagaagaaggtactactgactggaaaagagtaaatgaaccagacaaacttataactacctgtgaatgtgtggtgcctaatctgaaagagctcaggaagtacagattcagagtgaaagctgtcaatgaagctggtgaatctgaaccaagtgatacaactggggagatccctgccactgatattcaagaggaaccagaagttttcattgacattggagcacaggactgtctggtttgtaaagctggctcacagattaggattcctgctgtcatcaagggacgcccaacaccaaaatcatcttgggaatttgatggaaaggcaaagaaagcaatgaaggatggagttcatgacatacccgaagatgcacagctggagactgctgaaaactcctcagtaattattattccggagtgtaaacgatctcatacaggcaaatacagcatcacagccaagaataaagcaggacaaaagactgcaaattgcagagttaaagtcatggatgtaccaggcccacccaaagatctgaaagtcagtgatatcacaaggggtagttgcagactttcatggaagatgccagacgacgatggaggagacaggatcaaaggctatgttattgagaagaggactattgatggaaaagcctggaccaaagtcaatccagactgtggaagcaccacatttgtagtgcctgatctcctctctgaacagcaatatttcttccgtgtgcgagcagaaaaccgttttggtattggcccacctgtggaaaccattcagaggaccactgccagagatccgatatatcctcctgatcctcctattaaactcaagattggcctcatcacaaagaacacagtgcatctgtcatggaaacccccgaagaatgatgggggctcccctgttacccactatattgttgagtgccttgcatgggaccctactgggacaaagaaagaagcctggaggcagtgcaataagcgtgatgtggaagaactgcaatttactgttgaagacctagtagaaggtggggaatatgaattccgagtcaaagctgtcaatgctgcaggagtcagcaagccttcagccactgttggcccctgtgactgtcaaagaccagacatgccaccatcaattgatctaaaagaattcatggaggttgaagaaggaaccaatgttaacattgtggccaaaattaaaggtgtgccattcccgacactaacctggtttaaagctcctccaaagaagcctgataacaaagaacctgttctctatgacacccatgtcaacaaactggtggtagatgatacttgcactttagttattccgcagtctcgcaggagtgacactggcttatataccatcacagctgtaaataatctgggaacagcatcaaaggagatgagactgaatgtcctgggtcgtcctggccctccagtgggacccataaaatttgaatctgtttcagcagatcaaatgacactatcttggtttccacctaaagatgatggtgggtctaagattacaaactatgtaattgagaaaagagaagctaacaggaagacatgggtccatgtctccagtgaacctaaggagtgcacgtacacgattcccaaattgctagaaggccatgaatatgtattccgaatcatggcccagaataaatatggcattggagaacctcttgacagtgaacctgaaacagcaagaaacctcttctctgtccctggagcaccagataaaccaacagttagcagcgtgactcgtaactccatgactgtcaactgggaagagccagaatatgatggaggctctcctgtgacagggtactggctggaaatgaaagacaccacttcaaagagatggaagagagttaaccgagatcctatcaaagccatgactttgggtgtttcttataaagtgactggtcttattgaaggttccgactatcaattccgggtatatgcaatcaatgctgctggcgtgggtccagcaagtctgccatcagacccagcgactgctagagatccaattgcccctcctggtcctccatttcccaaagtgacagattggactaaatcatctgcagatctggagtggtctcccccactaaaagatggtggatccaaagtaactggatacatcgttgaatataaagaagaaggaaaagaagaatgggaaaagggtaaagataaagaagtgagaggaacaaagctcgttgtgacaggattaaaggaaggagcattctacaaatttagagttagtgcagtcaacattgctggcattggagaacctggagaggtcacagatgtcattgaaatgaaggacagacttgtttcacctgaccttcagctagatgccagtgtcagagatagaattgttgtccatgctggaggggtgatccgaatcattgcctatgtgtctggaaagcctcctccaaccgtcacctggaacatgaatgaaagaaccttacctcaagaagccaccattgagaccacagccattagctcatccatggtcatcaagaactgccagaggagccatcaaggcgtctattctcttcttgccaaaaatgaagccggagaaagaaagaagacaattattgttgatgtattagatgttccaggtcccgttggaacaccattcctagctcacaacctaaccaatgagtcctgcaaactgacatggttttctccagaagatgatggaggctctccaatcaccaattatgtcattgaaaagcgtgaatctgaccgcagagcatggaccccagtgacatatacagttacccgacaaaatgctactgtccagggtctcattcaaggaaaagcctactttttccgaattgcggctgaaaatagtattggcatgggtccatttgttgagacatcagaggcacttgttatcagagagccaataactgtaccagagcgtcctgaagacctggaagtcaaagaagttactaaaaatactgtaactttgacttggaatcctcctaagtatgatggtgggtcagaaattattaactatgtcctagaaagtcggctcattgggactgagaagttccacaaagttacaaatgacaacttgcttagcagaaaatacactgttaaaggcttaaaagaaggtgatacctatgagtaccgtgtcagtgctgtcaacattgttggacaaggcaaaccatcattttgcaccaaaccaattacttgcaaggatgagctggcacccccaacgcttcacctcgacttcagagataagctcacgattcgagttggtgaagcttttgccctcactggccgttactcaggcaaaccaaagcctaaggtttcctggttcaaagatgaagctgatgtgctggaagatgatcgcactcatataaagactacaccagcaacacttgctttagagaagatcaaggccaaacgttcagattccggcaaatactgtgtggttgtggagaacagtacaggctctaggaaaggtttctgtcaagttaatgttgttgaccatcctggaccaccagtaggaccagttagttttgatgaggtgaccaaagattacatggttatctcttggaagcctcctttagatgatggaggcagtaaaatcaccaattatattattgagaagaaggaagtgggtaaagacgtctggatgccagtgacatctgcaagtgctaaaacaacatgcaaagtttctaaactacttgaaggaaaagattatattttccggatacatgctgaaaatctgtatggaataagtgatcctctggtgtctgattcaatgaaagccaaagatcgtttcagggttcctgatgcacctgatcagccaattgttacagaagttaccaaagactctgcattagtaacctggaataagccacatgatggaggaaaacccatcacaaactacatcctggaaaagagagaaactatgtctaaacgatgggctagagttaccaaagatcctattcatccatacactaaatttagggttcctgatcttctagaaggatgtcagtatgaattccgggtttctgcagaaaatgaaattggtattggagatccaagcccaccatccaaaccagtctttgctaaagatccaattgctaaaccaagtccacctgttaatcctgaagcaatagatacaacatgcaattcagtcgatctaacttggcagccaccacgtcatgatggtgggagcaagattctgggttatattgttgagtaccagaaagttggagatgaagagtggagaagagccaatcacacccctgagtcatgtcctgaaactaaatataaagtcaccggtcttcgggacggtcaaacctataagtttagagtgttagcagtcaatgcagctggtgaatcagatccagctcatgttccggagccagtcctagtaaaagacaggcttgaaccccctgagttgattcttgatgccaacatggcaagagaacaacacattaaagttggtgatactctaagacttagtgccatcatcaaaggagtgccattcccaaaagtaacttggaaaaaagaagacagagatgctccaactaaagcaagaattgatgtgactccagttggtagcaagcttgaaattcgtaatgctgcccatgaagatggtggaatttattctttaacagtggagaatccagctggttcaaaaactgtctcagtaaaagtacttgtattagataaacctgggccacctagagatctggaagtcagtgaaattaggaaagattcatgttaccttacttggaaagaaccactagatgatggtggttctgttattaccaattatgtggttgagaggagagatgttgccagcgcccagtggtcacctctctcagctacatcaaagaaaaagagtcacttcgctaagcatctgaatgaaggcaaccagtacctcttccgagtagctgcggagaaccagtatggacgtggtccttttgttgaaacaccaaaaccaatcaaggctttggatcctctccatcccccagggccacccaaggacctgcaccatgtagatgttgacaagactgaagtctccctagtctggaataagccggatcgtgatggtggttctccaatcactggatatttggtagaatatcaagaagaaggcacccaggactggattaaatttaagactgtgacaaacttagagtgtgtggttactggactacaacaaggaaagacctatagattccgtgtaaaagctgaaaacattgtgggtcttggtctccctgacacaactatcccgatagaatgtcaagaaaaactagtgcctccatccgtggagctagatgtgaaattaattgaaggtcttgtggtaaaggctggaaccacagtcagattccctgctattataagaggtgtgcctgttcctactgcaaagtggacaaccgatgggagtgagattaaaaccgatgagcactacacagttgaaacagacaacttctcatcagtacttaccattaagaactgcttaaggagagacactggggaatatcaaatcacagtttccaatgcagccggtagcaaaacagtagccgtacatcttactgttcttgatgttcctgggccaccaacaggtcctattaatattctggatgttactcctgaacacatgactatctcatggcagccacctaaggatgatggaggaagccctgtgataaattatattgttgagaaacaagatacaaggaaagacacgtggggtgttgtctcttccggaagcagtaagacaaagctgaaaatcccacatctgcagaagggctgtgaatatgttttccgagttagagcagagaataagataggtgttggtcctccccttgactccacacctactgttgctaagcataaatttagtcctccgtctcctcctggtaaaccagtggttactgacattactgaaaatgcagcaacagtgtcttggaccctgccaaaatctgatggtggcagtccaataactggctactatatggaacgtcgagaagtaactggcaaatgggtgagggtcaacaaaacacctatcgctgacctgaagttcagagtgactggactctatgaaggaaatacatatgagtttagagtttttgctgaaaatcttgcaggactaagcaaaccatccccaagttctgatccaataaaagcttgccggcccatcaaaccacctggaccacctattaatcctaaactgaaagacaagagcagagaaacagctgatttggtgtggacaaagcctctcagtgatggtggtagccccattctaggatatgtagtggaatgtcagaaacctggcacggcacaatggaacaggattaataaagatgaactcattaggcaatgtgcctttagggtacctggactaattgaaggaaatgagtacagattccgtataaaggcagctaatattgtaggagagggtgagccaagagaactagcagaatctgtgattgcaaaagatatccttcatcctccagaagtagaacttgatgttacttgtcgtgatgttattaccgtgagagtaggccaaactatccgcattctagctcgagtcaaaggcagacctgaaccagacataacttggactaaggaaggcaaagtattggtccgagaaaagagggtggaccttattcaggatctacctcgtgttgagttacaaattaaagaagctgttagagctgatcatggcaagtatatcatctcagctaagaacagcagtggacatgcccaaggttcagccatcgttaacgtccttgacagacctgggccttgccagaatttgaaggttaccaatgtaaccaaagagaactgtacaatttcttgggaaaacccactagataatggtggctcagaaataacaaacttcatagtagaatatcgcaaaccaaaccagaaaggctggtcaattgttgcatcagatgtcactaaacgattaatcaaggccaaccttttagccaacaatgaatactatttccgagtttgtgcagagaataaagtaggtgttgggccaaccatcgaaacaaaaactcccattctggctattaaccctattgacagaccaggtgagcctgaaaaccttcacattgcagataaaggaaagacatttgtctacctaaagtggcggaggcctgactatgatggtggcagtccaaatctgtcatatcatgttgagagaaggcttaagggctccgatgactgggaaagagtgcataaaggaagcattaaagaaactcactacatggttgacagatgtgttgaaaaccagatttatgagttcagagtgcaaacaaagaatgaaggtggggaaagtgactgggtgaagacagaggaagttgttgtgaaagaagacttacaaaaaccagtacttgatctgaaattaagtggggtcctaactgtcaaagcaggggacaccattaggcttgaggcaggggttagaggcaaaccattcccagaagttgcatggaccaaggacaaagacgctacagacttaacaagatcaccaagggtcaagattgatacccgtgctgattcatctaaattttctcttactaaagcaaagcgaagtgatgggggtaaatatgtagttacggcaactaacacggctggcagttttgtggcctatgccactgtcaatgttttagataagcctggtcctgtgagaaatctgaaaattgttgatgtgtccagtgataggtgtactgtttgctgggatccaccagaagatgatggtggctgtgaaatccaaaattatattctagaaaaatgtgagacaaagcgaatggtttggtctacctattctgctactgtcttgacacctggtactacagtaacacgtctcatagaaggaaatgaatatattttcagagtccgtgcagaaaataaaataggcacagggcctccaacagaaagtaaaccagtcatagccaaaaccaagtatgataaacctggtcgccctgatcccccagaagtcactaaagtaagcaaagaagagatgactgtggtttggaatccacctgaatatgatggtggaaagtctataactggatactttttggagaaaaaggaaaagcattcaacacgatgggtccctgtcaacaagagtgcaatccctgagagacgtatgaaagtacagaatctcctcccagaccatgaatatcagttccgtgtcaaggcagaaaatgaaattggaattggagaaccaagcttgccttcaagaccggtggtggcaaaagaccccatagagccacctggtccaccaaccaatttcagagtggttgatacaaccaaacattccataactcttgggtggggaaaaccagtctatgatggtggtgcaccgatcattggatatgttgtggaaatgagaccaaaaatagcagatgcgtctcctgatgaaggctggaaacggtgtaatgctgcagcacagcttgtacgcaaggaattcactgttaccagcttggatgaaaaccaggaatatgagttcagggtgtgtgcccaaaaccaagttggtattgggcgccctgcagagctaaaggaagctatcaaacctaaagaaatactagaacctccggagattgatttggatgccagcatgaggaaactggtcatagtgagagcaggatgccctattcgtctctttgctatagtgagaggacgaccagcccctaaagtcacttggcgaaaagttggcattgataatgtggtcagaaaaggacaagttgatctggttgacactatggccttccttgtcatccccaattctacccgtgatgactcaggaaaatattccttaacacttgtgaacccagcaggagaaaaggctgtattcgtaaatgtcagagtattagacactcctgggcctgtgtctgatttaaaagtttcagatgtcactaaaacatcatgccatgtgtcctgggcccctcctgaaaacgacggtgggagccaagtgacacattatatcgtggagaaacgtgaggcagacagaaagacatggtcgaccgttaccccagaagttaagaaaacaagcttccatgtaaccaatcttgtccctgggaatgagtattacttcagagtaactgctgtcaacgaatatggccctggcgtcccaacagatgtcccaaaaccagtgcttgcatcagatcctctaagtgagccggatcccccaaggaaattagaagcgactgaaatgaccaagaacagtgccaccttagcctggttacctcccctacgtgatggaggtgctaaaatcgatggctacatcattagttacagagaagaagagcagcctgcagatcgctggacagagtactcagtggtaaaagatctgagccttgttgtcactggcctaaaggaaggaaagaaatacaaatttagagtagcggccagaaatgctgttggagtcagtttgccaagagaagctgaaggagtgtatgaagccaaagagcaactgttgccaccaaagatccttatgccagagcaaataactatcaaagctgggaaaaaactccgaattgaagcccatgtgtatggaaagcctcatcccacctgtaaatggaaaaaaggagaagatgaagttgtcacatccagccacctggcagtgcataaagcagacagctcttcaattctgatcataaaagatgtgactaggaaagacagtggttactacagcctcacagcagagaacagttctgggacagacactcagaaaatcaaagttgtagtcatggatgcccccggcccccctcagcctccatttgacatttctgatatagacgctgatgcttgctccctgtcatggcacatccctctggaggacggaggcagtaacatcaccaattatatagtggagaagtgtgatgtaagccgaggtgactgggtcacggctctagcttcagtcacaaaaacttcctgcagggttggaaagctgatcccaggccaagagtacatcttccgggtccgtgctgaaaaccgatttggcatttcagagcctctcacatctccaaagatggttgcgcagttcccatttggtgttcctagtgaaccaaagaatgcacgagtcaccaaagtcaacaaggactgtatttttgttgcttgggacagaccagatagtgatggagggagccccattattggttatctgattgaacgcaaggaaagaaacagtttgctgtgggtgaaagccaatgatactcttgtccggtcaactgaatatccttgtgctggccttgtagaaggtcttgagtattcattcagaatctatgccctaaacaaagctggatccagcccacccagcaaacccacagaatatgtaactgcaagaatgccagttgatcctcctgggaaacctgaggttattgatgtcaccaagagtactgtatctctgatctgggctcgtccaaagcatgatggaggcagtaaaattattggctatttcgtagaagcttgcaaacttcctggtgataaatgggtacggtgcaatactgcacctcaccagattccccaggaagagtacacagctactggcctagaagagaaagctcagtatcaatttagagctattgccaggaccgcggtaaacattagcccaccttctgaaccttctgatccagtgactatcctcgcagaaaatgtccctcccaggatagacctgagtgtggctatgaaatctttgcttactgtgaaagctggaactaatgtctgcttggatgctactgtttttggtaaaccgatgccaacagtttcttggaaaaaagatggcacactgctaaaaccagcagaaggcataaagatggccatgcagcggaatctgtgcaccttggagctattcagcgtgaaccggaaggactcaggagactataccattactgctgaaaattcaagtggttctaaatcagccaccattaagcttaaagtgttagataaaccgggtcctccagcatctgttaaaatcaacaaaatgtattcagatcgtgctatgctttcttgggaaccgcctcttgaagatggaggctcagaaatcaccaactatattgttgacaaacgtgaaacaagcaggcccaactgggctcaagtctctgcaactgtgcctatcaccagctgcagcgtggagaaacttatagagggccatgagtatcagttccgtatttgtgctgaaaataaatatggagtaggcgatccagtcttcactgaaccagcaattgccaaaaacccatatgacccaccaggacgctgtgatcctcctgttattagcaacataaccaaagatcacatgacagtcagctggaagccaccagcagatgatgggggctcacccatcactggctatttgcttgaaaagcgggaaacccaggctgttaactggactaaggtcaacagaaaacctattatagaaagaacattaaaagcaacaggtcttcaagaaggtaccgaatatgagttccgtgttacagctataaataaagctggaccaggcaaacccagtgacgcatccaaggccgcttatgctcgggaccctcagtatcctcctgcgccaccggctttccctaaagtatatgatacaactcgcagctctgtgagtctatcttggggcaagccagcctatgacggcggcagccctatcattggttatctcgttgaagtaaaacgggctgactccgataactgggtgaggtgcaacttaccacagaatctacagaaaacccgctttgaggttactggcctgatggaagacacacaatatcaattccgtgtgtatgccgttaataagattggatacagtgaccccagtgatgtgccagataaacactatcccaaggacatcttaattccacctgagggagaacatgatgcggacttaaggaagacactcatattacgtgctggagttactatgagactatatgtaccagtaaaaggacgcccacctccaaagattacttggtctaaaccaaatgtcaatctaagagacaggattggactggacataaagtcaactgactttgacactttcttgcgctgtgaaaatgtgaacaaatatgatgcaggaaaatatatcttaaccctggagaacagctgtggtaaaaaggaatataccattgttgtgaaagtgcttgatactcctgggccacctatcaatgtgactgttaaggaaatatccaaagactctgcttatgttacctgggagcctcccattattgatggcggaagccccatcataaactatgtggtacaaaaacgtgatgcagagaggaaatcctggtctacagtgacaactgagtgctccaaaacaagcttcagagtacctaatttggaggagggaaaatcctacttcttccgagtgtttgctgaaaatgagtatggcattggtgatcccggtgaaactcgtgatgctgtcaaagcttcccaaactcctggaccagttgtggacctgaaagtgaggtctgtatctaagtcatcctgtagcattggctggaaaaagcctcacagtgatggtggaagtcggattattggatatgtagttgatttcctgactgaagaaaataagtggcaacgagttatgaaatccttaagcctacagtactctgcaaaagatttgactgaagggaaggaatataccttcagagtgagtgctgagaatgaaaatggagaaggaaccccaagcgaaatcactgttgtggcaagggatgatgttgtggctcctgatcttgacttaaagggtctacctgatttgtgctacttggctaaagaaaacagcaacttccggcttaagatccccataaaaggcaagccagctccatcagtctcctggaagaaaggggaagatcctctagcaactgacactagagtcagtgttgagtcatctgcggttaacacaactcttatagtgtacgattgccaaaaatctgatgctggaaaatacacaatcacacttaagaatgttgctggcaccaaggaaggaactatctccataaaggttgttggcaagcctggcatccccactggaccaatcaaatttgatgaagtcacagcagaagccatgaccttaaagtgggctcctccaaaggatgatggaggttctgaaatcaccaactatatcctagagaagagggattctgtgaacaacaagtgggtgacgtgcgcctcagctgtccagaaaaccacctttagagtaaccagacttcatgagggcatggaatataccttcagggtcagtgccgaaaataaatatggtgtaggggaaggcctgaaatcggagccaattgttgcgagacatccatttgatgtgcctgatgctcccccacctcccaatattgtggatgtcagacacgattcagtatctctaacttggactgaccccaagaaaactggtggttctccaattacagggtatcatctcgagttcaaggaaagaaacagccttttgtggaagagagctaacaagactccgataaggatgagagactttaaagtgacaggattaactgaaggtcttgaatatgaattccgagttatggcaatcaatttagcaggtgtgggcaagccaagcctaccatcagagcctgttgtggcactggacccaattgatcctcctggaaaacctgaggttattaacataacaaggaattcagtgactctcatttggactgaacctaaatatgacggtggtcataagttaactggatatatagtggagaagcgagatctaccttcgaagtcttggatgaaagccaaccatgttaatgtcccagaatgtgcctttactgtaactgaccttgttgagggtggaaaatatgaattcagaattagagcaaagaatacagcaggtgctatcagtgctccatcagaaagtacagaaaccattatttgcaaggatgaatacgaggcaccaacaattgtccttgatcccacaataaaagatgggctaacaattaaagcaggggataccattgttttgaatgccattagcattcttggcaaaccccttccaaaatcaagttggtccaaggcaggaaaagacattagaccatcagatatcactcagataacttcaaccccaacatcttccatgcttactatcaagtatgccactagaaaagatgcgggtgaatataccatcactgctaccaatccttttggcacgaaggtggaacatgtgaaggtaacagtccttgatgtacctggtcccccaggtcctgttgaaatcagtaatgtttctgctgaaaaagcaacacttacatggacacctcccttggaagatggcggctcaccaattaagtcctatatacttgaaaagagagaaaccagccgacttttgtggacagtggtttctgaagatattcagtcttgcaggcatgtggcaaccaaacttatccaaggaaatgagtacatcttccgggtctcagctgtaaaccactatggcaaaggagaacctgtacagtctgaacctgtcaaaatggtagacagatttggtccccctggccctcctgaaaaaccagaggtatcaaatgtcactaagaacactgccactgtcagctggaaaaggccagtggatgatggtggcagcgaaattacaggatatcatgtagaaaggagagaaaagaaaagcctgcgatgggtgagagcaataaaaacaccagtttccgatctcaggtgcaaagtaacaggactgcaagaaggaagcacctacgaattccgtgtcagtgcagaaaacagagcaggaattggtccacccagtgaggcttcagattctgttctgatgaaagatgcagcatatcctccaggaccaccttcaaatccgcatgtcactgatactaccaagaaatctgcttctttggcatggggcaagcctcattatgatggtggacttgaaatcactggctatgtcgtggagcatcaaaaagtaggagacgaggcctggataaaagataccacaggaaccgccctcagaatcactcagttcgttgttcctgatcttcagactaaagaaaaatacaacttcagaatcagtgccatcaacgatgcaggtgttggggagccagcggtgattccagatgttgaaatcgtagaacgggagatggctcctgattttgaactagatgccgagcttcgaagaacacttgttgttagagcaggactcagtattaggatatttgtgccaattaaaggtcgtcctgctcctgaagtgacatggaccaaagataacatcaacctgaaaaaccgagccaacattgaaaatacggaatcatttactcttctgattatcccagaatgtaacagatatgataccggtaaatttgtcatgaccattgaaaacccggctgggaagaaaagtggctttgtgaacgtcagagtcttggacacgccaggcccagtcctcaacctgcggcctacagacatcacaaaggacagtgtcaccctgcactgggacctccctctgatagatggaggctcacgtataacaaactacattgtagagaaacgtgaagcaacacggaaatcttattccacagccaccactaagtgccataaatgcacatataaagttaccggcttgtctgaagggtgtgaatatttcttcagagtgatggcagagaatgaatatggaattggtgagccaacagaaactacagagcccgtaaaagcctctgaagcaccatctccaccagacagccttaacatcatggacataactaagagcaccgtcagcctggcatggcctaagcccaaacacgatggtggcagcaagatcactggctatgtgattgaagcccaaagaaaaggctctgaccagtggacccacatcacaaccgtgaaagggttagaatgtgttgtgaggaatctaactgaaggagaggaatataccttccaagtgatggcagtgaacagcgcggggagaagtgcccctagagaaagcagacccgtcattgtcaaggagcagacaatgcttccagagctggatctccgtggcatctatcagaaactggtcattgccaaagctggtgacaacatcaaagttgaaattccagtgctcggtcgaccgaagcccacagtgacatggaaaaaaggagaccaaattcttaaacagacacagagagttaattttgaaaccacagcgacttcaaccattttaaatatcaatgagtgtgtcagaagtgatagtgggccctatccattaacagcaaggaacattgtaggagaggttggtgatgtcatcaccattcaagtccatgatatcccagggccacctactggaccaatcaaatttgatgaagtttcatctgattttgtaaccttctcttgggacccacctgagaacgatggtggtgtaccaataagcaactatgtagtggaaatgcggcagactgacagtactacctgggttgagttagcaaccaccgttatacgtactacctataaagccacccgccttactactggattagagtatcagttccgtgtaaaagctcagaatagatatggagttggaccaggcatcacatcagcatggatagttgccaactatccatttaaggttcctggacctcctggtacccctcaggtaactgcagttaccaaggattcaatgacaattagctggcatgagccactttctgatggtggaagccccattttaggatatcatgttgaaagaaaagaacgaaatggtattctctggcagactgtgagcaaagctttagtaccaggcaacattttcaaatcaagtggacttacagatggtattgcttatgagttccgggtgattgcagaaaacatggcaggcaaaagtaagccaagcaagccatcagaacctatgttggctctggatcccattgacccacctggaaaaccagtacctctaaatattacaagacacacagtaacacttaaatgggctaagcctgaatatactgggggctttaaaattaccagttatatcgttgaaaagagagaccttcctaatggacggtggctgaaggccaacttcagcaacattttggagaatgaatttacagtcagtggcctaacagaagatgctgcatatgaattccgtgtgatcgccaaaaatgctgcaggtgccatcagtccaccatctgagccatctgatgctatcacttgcagggatgatgttgaggcaccaaagataaaggtggatgttaaatttaaggacacggttatattaaaagcaggtgaagcattcagactggaagctgatgtttcaggccgcccacctccaacaatggaatggagcaaagatggaaaagagctggaaggcacagcaaagttagaaataaaaattgcagatttctctactaatctggtaaacaaagattcaacaagaagggatagtggtgcctatacccttacagcgactaatcctggtggctttgctaaacacattttcaatgtcaaagttcttgacagaccaggcccacctgaaggacctttggctgtaactgaagtgacatcagaaaagtgtgtactatcatggttccctccactggatgatggaggtgccaaaattgatcattacatagtacagaaacgtgaaaccagcagattggcatggacaaatgtagcctcagaagtccaagtaacaaagctaaaggtcactaaactcttgaaaggcaatgaatacatattccgtgtcatggctgtaaataaatatggagtgggagagccactggaatcagagcctgtgcttgcagtgaatccttatggaccccctgatccgcccaaaaaccctgaagtgacaactattactaaagattcgatggttgtctgctggggacatcctgattctgatggtggaagtgaaatcatcaattatattgtggaacggcgtgataaagctggccaacgctggattaaatgcaacaaaaaaactcttactgatttaagatataaagtgtctggactgacagaaggacatgaatatgagttcaggattatggctgaaaatgctgctggaattagtgcaccaagtcctaccagtccattttacaaggcttgtgacactgtgtttaaacctggaccaccaggtaacccacgtgttctggatacaagcagatcatccatttcaatcgcttggaataaacctatctatgatggtggttcagaaatcactgggtatatggttgagattgccctgccagaggaagatgaatggcagattgtcactccaccagcaggactcaaggcaacttcgtatactatcactggcctcacagagaatcaggaatataagatccgcatctatgccatgaattccgaaggacttggggaacctgcccttgttcctggaactccaaaggctgaagacagaatgctgcctccagaaattgaactggatgctgacctgcgcaaagttgttactataagggcctgctgcaccctgagactttttgttcccatcaaaggaaggcctgaccctgaggtgaagtgggcccgggaccatggagaatctttagataaagctagcatcgaatccgcaagctcttacaccctgcttattgttggaaatgtaaacagatttgacagtggcaaatatatactaactgtagaaaatagttcaggcagcaagtctgcatttgtcaatgttagagttctcgatacaccaggccccccacaggatctgaaggtaaaagaggtcactaagacatctgtcacactcacatgggacccacctctccttgatggaggttcaaaaatcaagaactatattgttgaaaagcgggaatcaacaagaaaagcatattcaactgttgcaacaaactgccacaagacttcctggaaggtagaccagcttcaagaaggctgtagctactatttcagggttctcgcagaaaatgaatatggcattgggctgcctgctgaaaccgcagaatctgtgaaagcatcagaacgacctcttcctccaggaaaaataactttgatggatgtcacaagaaatagtgtgtcactctcttgggagaaaccagagcatgatggaggcagccgaattctaggctacattgtggagatgcagaccaaaggcagtgacaaatgggccacgtgtgccacagtcaaggtcactgaagccactatcactggattaattcagggtgaagaatactctttccgtgtttcagctcagaatgaaaagggcatcagtgatcctagacaactgagtgtgccagtgatcgccaaagatcttgtcattccaccagccttcaaactcctgttcaatactttcactgtactggcaggtgaagacctaaaagttgatgttccattcattggccgccctaccccagctgtaacctggcataaagataatgtaccactgaagcagacaactagagtaaatgcagagagcacagaaaataattcactactgacaataaaggacgcctgccgagaagatgttggccattatgtggttaaactgactaactcagctggtgaagctattgaaacccttaatgttatcgttcttgacaaaccagggcctccaactggaccagttaaaatggatgaagtgacagctgatagtattactctttcctggggcccacccaagtatgatggcggaagttctatcaataattacattgttgagaaacgggacacttccacaaccacctggcaaattgtatcagctacagttgcaaggacaacaataaaggcttgcagactgaagactggatgtgaatatcagtttagaattgcagctgaaaacagatatgggaagagtacctacctcaattcagagcctactgtagcccaatatccattcaaagttcctggtcctcctggcactccagttgtcacactgtcctccagggacagcatggaagtacaatggaatgagccaatcagtgatggaggaagtagagtcattggctatcatctagaacgcaaggaaagaaatagcatcctctgggttaagttgaataaaacacctattcctcaaaccaagtttaagacaactggccttgaagaaggtgttgaatatgaatttagagtctctgcagagaacatcgtgggcattggcaagccgagtaaagtatcagaatgttatgtggctcgtgacccatgtgatccaccaggacggccagaggcaatcattgtcacaaggaattctgtgactcttcagtggaagaaacccacctatgacggtggaagcaagatcactggttatattgttgagaagaaagaattacctgagggccgttggatgaaagccagttttacaaatattattgacactcattttgaagtaactggcctagttgaagatcacagatatgagttccgggttatagcccgaaatgccgcaggagtgtttagtgagccttcagaaagcacaggagcaataacagctagagatgaggtagatccaccacgaataagtatggatccaaaatacaaagacacaatcgtggttcatgctggtgaatcattcaaggttgatgcagatatttatggcaaaccaataccaaccattcagtggataaaaggtgatcaggagctttcaaacacagctcgattagaaataaagagcaccgactttgccaccagtctcagtgtaaaagatgcagtacgtgtcgacagtggaaattacatactgaaggccaaaaatgttgcaggagaaagatcagttactgtgaatgtcaaggttcttgacagaccagggccacctgaaggacctgttgttatctcaggagttacagcagaaaaatgcacactagcttggaaacccccacttcaggatggtgggagtgacatcataaattatattgtggaaaggagagaaaccagccgcttagtttggactgtggttgatgccaatgtgcagactctcagctgcaaggttactaagcttcttgaaggcaatgaatatactttccgtataatggcagtaaacaaatatggtgttggtgaacctcttgaatctgagccagtagttgccaagaatccatttgtagtaccagatgcaccaaaagctccagaagtcacaacagtgaccaaggactcaatgattgttgtatgggaaagaccagcatctgatggtggtagtgaaattcttggatatgttcttgagaaacgggataaagaaggcattagatggacaagatgccataagcgtctgattggagagttgcgcctgagagtaactggactcatagaaaatcacgattatgagttcagagtttctgctgagaatgctgctggacttagtgaaccaagccctccttctgcttaccaaaaggcttgtgatcctatttataaaccaggacccccaaacaaccccaaagtcatagacataaccagatcttcagtattcctttcttggagcaaaccaatatatgatggtggctgtgaaattcaaggatacattgttgaaaaatgtgatgtgaatgttggtgaatggacaatgtgcactccaccaacaggaattaataaaacaaacatagaagtagagaagctgttggaaaagcatgaatacaacttccgtatctgtgctattaataaagctggagttggagaacatgctgacgtccctggacctattatagttgaagaaaaattagaagcaccagacattgatcttgacctagaactaaggaaaatcataaatataagggcaggtggctccttaaggttatttgttcctataaaaggtcgtcctacaccagaagttaaatggggaaaggtggatggtgaaatccgagatgcagctataattgatgtcactagcagtttcacctctcttgttcttgacaatgtcaaccgatatgatagtggaaaatatacgcttacattagaaaacagcagtggaacaaagtctgcctttgttactgtgagagttctggacacgccaagtccacctgttaacctgaaagtcacagaaatcaccaaagactcagtatcaattacatgggaacctcctttgttggatgggggatccaaaataaaaaattacattgttgagaaacgtgaagccacaagaaaatcatatgctgctgttgtaactaactgccataagaattcttggaaaatcgatcagctccaagaaggttgcagttattactttagagtcacagctgagaatgagtatggtattggccttcctgcccagactgctgatccaattaaggttgcagaagtgccacaacctcctggaaaaataactgtggatgatgtcaccagaaacagtgtctctctgagttggacaaaacctgaacatgatggtggcagtaaaatcattcagtatattgtggaaatgcaagctaaacacagtgagaaatggtcagagtgtgctcgagtaaagtctcttcaggcagtaattaccaacctaactcaaggggaagaatatctttttagagttgttgctgtaaatgaaaaggggagaagtgatcctcggtcccttgcagttccaatagttgccaaagatctggtaattgagccagatgtaaaacctgcattcagtagttacagtgtacaggttggccaagatttgaaaatggaagtgccaatttctggacgtcctaagccaaccattacctggactaaagatggtctcccactgaagcagaccacaagaatcaatgttaccgattcactggatctcaccacactcagtattaaagaaactcataaggatgatggtggacaatatggaatcacagttgccaatgttgttggtcagaagacagcatccatcgaaattgtaactctagataaacctgatcctccaaaaggacctgttaaatttgatgacgtcagtgctgaaagtattacattatcttggaaccctccattatatacagggggctgccaaatcaccaactacattgttcagaaaagagatacaaccaccacagtatgggatgttgtttctgctactgttgctagaactacactcaaagtgaccaaactgaaaactggtacagaataccaatttagaatatttgccgaaaacagatatggacaaagctttgccttagagtctgatccaattgtagctcaatatccctacaaagaaccaggccctccaggtacaccatttgccacagccatttccaaagactccatggtcatacagtggcatgaaccagtcaacaatggtggaagccccgtcataggttaccacctggagagaaaagaaagaaacagtattttgtggacaaaggtcaacaaaactattattcatgacacccaattcaaagcacagaatcttgaagaaggcattgaatatgaattcagagtgtatgctgaaaatattgttggtgtaggcaaagcaagcaagaattctgaatgctatgtagccagagatccctgtgacccaccaggaaccccagaaccaataatggttaaaagaaatgaaatcactttacagtggaccaaacctgtgtatgatggtggaagtatgattacaggctacattgtagagaaacgtgatttgcctgatggtcgttggatgaaagctagctttacaaatgtcattgaaactcaatttactgtgtcaggtcttactgaagatcaaagatatgaattcagagtcattgcaaagaatgcagctggtgcaataagtaaaccctctgacagtactggaccaataactgccaaggatgaggttgaactcccaagaatttcaatggatccaaaattcagagacacaattgtggtaaatgctggagaaacattcagacttgaggctgatgtccatggaaagcccctacctaccattgagtggttaagaggagataaggaaattgaagaatctgctagatgtgaaataaagaacacagatttcaaggctttacttattgtaaaagatgcaattagaattgatggtgggcagtatattttaagagcttccaatgttgcaggttctaagtcattcccagtaaatgtaaaagtattagatagaccaggacctccagaagggccagtccaggttactggagtcacttctgaaaaatgctctttaacatggtctccaccacttcaagatggtggcagtgacatttctcactatgttgttgaaaagcgagaaaccagtcgacttgcctggactgttgttgcttcagaagttgtgaccaattctctgaaagttaccaaactcttagaaggtaatgaatatgttttccgtataatggctgtcaacaaatatggtgttggagagcctttggaatctgcaccagtactaatgaaaaatccatttgtgcttcctggaccaccaaaaagcttggaagtcacaaatattgccaaagactccatgaccgtctgttggaaccgtccagatagtgatggtggaagtgagattattggttacattgtagagaaaagagacagaagtggcattcgatggataaaatgtaataaacgccgcattacagatttgcgtctaagagtgacaggattaacagaagatcatgagtatgaattcagggtctctgcagaaaatgctgctggagttggggaaccaagtccagctacagtttattataaagcctgtgatcctgtgttcaaacctggcccacctaccaatgcacacattgtagacaccactaaaaattcaatcacacttgcctggggtaaacccatctatgatggcggcagtgagatcttgggatatgtagtagaaatctgtaaagcagatgaagaagaatggcaaatagttactccacagactggcctgagagtcactcgatttgaaatttcaaaactcactgaacaccaagagtataaaatacgagtctgtgccctcaacaaagttggtttaggtgaggctacatcagttcctggtactgtgaaaccagaagataaacttgaagcacctgaacttgaccttgactccgaattaagaaaaggaattgttgtaagagctggtggatctgccagaattcacattccattcaaaggtcgtccaatgcctgagatcacttggtctcgagaggaaggtgaattcacagataaggtccaaattgaaaagggagtaaactatacccaactatcaatagataactgtgatagaaatgatgctggaaaatacattcttaagttggaaaacagcagtggatcaaagtctgcttttgtaactgtgaaagttcttgacactccaggaccaccacagaatttggcagtcaaagaagtgagaaaagattctgccttcctggtatgggagccacccatcattgatggaggggcaaaggtcaagaactatgtgattgacaaacgtgagtcaaccagaaaagcgtatgctaatgtgagtagtaaatgcagcaaaacaagttttaaagtggaaaaccttacagaaggagccatttattacttcagagtcatggctgaaaatgaatttggagttggtgttccagtggaaactgttgatgccgtgaaagctgctgaacctccttccccaccaggaaaggttacactcactgatgtgtcccagaccagtgcatcacttatgtgggagaaacctgaacatgatggcggtagcagagtcctggggtacgttgttgaaatgcagcccaaaggaactgaaaaatggagcattgtggctgaatccaaagtctgtaatgcagttgttactggtttgagttctggacaagaatatcagttccgtgtcaaggcttataatgagaaaggaaaaagcgatccaagagtgttgggtgttcctgtcatagccaaggacttgactatacagcctagtttaaagttaccatttaacacatatagtatccaagctggagaagatcttaaaatagaaattccagttataggccgaccaagacctaacatttcttgggtcaaagatggtgagcctcttaaacagacaacaagagtaaacgttgaagaaacagctacctcaactgttttgcacattaaagaaggtaacaaagatgactttggaaaatacaccgtaacggcaacaaatagtgcaggcacagcaacagaaaatctcagtgttatcgttttagaaaagcctggacctccagttggcccagttcggtttgatgaagttagtgcagactttgtagtcatatcttgggaacctccagcctatactggtggctgccaaataagcaactacattgtagagaagcgagatacaaccaccaccacttggcacatggtatcagcaacagttgcaagaacaacaattaaaataaccaaactgaaaacaggcacggagtaccagtttagaatttttgctgaaaacaggtatggaaaaagtgccccactggattctaaggcagttattgtacaatatccatttaaagaacctggaccacctggaactccttttgtgacatcaatctcaaaagatcagatgcttgtgcaatggcatgagccagtgaatgatggaggcaccaaaattattggctaccatcttgaacagaaagaaaagaacagtattttatgggtcaagttaaataagacccccattcaggacaccaaattcaaaacaactgggcttgatgagggccttgagtatgagttcaaagtttctgctgaaaatattgttggcattggcaagcctagcaaagtgtcagaatgctttgttgctcgtgatccatgtgacccacctggtcgccctgaagccattgttattacaagaaacaatgtcacactgaaatggaagaaacctgcctatgatggtggtagcaaaataacaggttatattgtagaaaagaaagatctacctgatggccgctggatgaaagccagctttaccaacgtattagaaactgaatttacagtgagtggacttgtagaagaccaaagatatgaatttagagtaattgcaagaaatgcagctggaaactttagtgaaccatctgatagtagtggtgccattactgcaagagatgaaattgatgcaccaaatgcctctctggatccaaaatataaagatgtcatcgttgttcatgcaggagagacttttgttcttgaagccgacatccgtggcaaacctatacctgatgttgtttggtcaaaagatggaaaagaacttgaagaaacagctgctagaatggaaattaaatctactattcagaaaacaactcttgttgtcaaagactgtatacggactgatggaggacaatatattctgaaactcagcaatgttggtggtacaaagtctatacccatcactgtaaaggtacttgacaggccagggtctcctgaagggcctctgaaagttactggagttactgcggaaaaatgttacctggcatggaacccacctttgcaagatggtggtgctaatatttcacattacatcattgaaaagagggagacaagccgactctcttggacccaggtttcaactgaggtacaggcccttaactacaaagttactaaacttcttcctggtaatgagtacattttccgtgtcatggctgtgaataaatatggaattggagagcccttggaatctgggcctgttacggcctgtaatccttataagccaccaggtcctccctcaacacctgaagtctcagcaatcaccaaagattctatggtagtaacatgggcacgcccagtagacgacggaggtaccgaaattgagggctacattcttgaaaaacgagataaggaaggcgttagatggaccaagtgcaacaagaaaacattaacggatctgcggctcagggtaactggtcttaccgaaggccattcctatgaattcagagttgctgctgaaaatgcagctggtgtgggagaacctagtgagccatctgttttctaccgtgcgtgtgatgccttgtatccaccaggtcccccaagcaatccaaaagtgacggacacttccagatcttctgtctccctggcatggagtaagccaatttatgatggtggcgcacctgttaaaggctatgttgtagaggtcaaagaagctgctgcggatgaatggacaacctgcactccaccaacaggattacaaggaaagcagttcacagtgaccaagcttaaagaaaacactgaatataacttccgtatttgtgccatcaattctgaaggtgtaggtgaacctgcaactctacctggctcagtggttgctcaggagaggatagagccaccagaaatagaactcgatgctgatctcagaaaggtggtcgttctgcgtgcaagtgctactttacgcttatttgtcactatcaaaggtcgaccagaacccgaagttaaatgggaaaaggcagaaggcattctcactgacagggctcagatagaggtgaccagctcatttacaatgttggtgattgataatgttaccagatttgacagtggtcggtataatctgacattagaaaataatagtggctccaaaacagcttttgttaacgtcagagttcttgactcaccaagtgcccctgtgaatttgaccataagagaagtgaagaaagactcagtgacgttgtcctgggaaccaccacttattgatggtggagctaagattacaaactacattgtcgaaaaacgagaaactacaagaaaagcctatgctaccattacaaataattgcactaaaactactttcagaattgaaaatctacaagaaggatgttcttactacttccgagtcttggcttccaatgaatatgggattggtttgccagctgaaacaacagaacccgttaaagtgtctgaaccacccctcccacctggaagagtaactcttgttgatgtgacccgtaatacagctacaattaagtgggagaaaccagaaagtgatggtggcagcaaaattactggttatgtggttgaaatgcagactaaagggagtgaaaagtggagcacctgcacacaagttaagactctagaagcaactatatctggcttaactgcaggagaagagtatgtcttcagggtagctgcagttaacgaaaagggaagaagtgatccaagacaacttggagtgccagtaattgcaagggatattgaaataaagccttcagttgagcttcctttccatactttcaatgtaaaggctagagaacaacttaagattgatgtgccattcaaaggaagacctcaagctactgtgaactggagaaaagatggtcagactcttaaagagacaactagagtcaatgtttcttcttcaaagactgtaacatcactatctattaaggaagcttcaaaggaagatgttggaacttatgaattatgtgtttcaaacagtgctggatccataacagttcctattactataattgtccttgacagaccaggacctccaggtcctatacgtattgatgaggttagttgtgacagcataaccatttcttggaatcctccagaatatgatggtggctgccaaattagcaattacattgttgaaaagaaagaaaccacctctacaacatggcacatagtttcacaagcagttgcaagaacatccattaaaatagttcgcctgacaacaggaagtgagtatcagttccgtgtttgtgcagaaaaccgctatggaaagagctcctacagtgaatcttcagctgttgttgcagagtatccattcagtcccccaggtcctcctggtactcctaaagttgtgcatgccacaaaatctaccatgcttgtaacctggcaagtgccagttaatgatggaggaagtcgagtaattggctatcatcttgagtataaagaaagaagcagcattctttggtcaaaagcaaataaaatcctcattgctgatactcaagtgaaagtctccggccttgatgaaggactgatgtatgagtatcgtgtatatgctgaaaatattgctggaattggtaaatgcagtaaatcttgtgaaccagtccctgcaagagatccttgtgaccctcctggacaacctgaagtcacaaatatcacaagaaaatcagtgtcacttaaatggtctaaaccacattatgatggtggagctaagatcacaggatacattgttgaacgcagagaactaccagatggccggtggctaaagtgcaattatactaatatacaagaaacatactttgaagtaactgaacttactgaagatcagcgttatgaattccgggtttttgcaaggaatgctgctgactcagttagtgagccatctgaatccactgggcctattatagttaaagatgatgttgagcctccaagagttatgatggatgtcaagttccgagacgttattgttgtcaaagctggagaggtccttaagataaatgcagacattgcagggcgacctctgccagtaatttcctgggccaaggatggtatagaaattgaagaaagagcaagaacagaaatcatctcaacagacaatcatactttgttaacagttaaagactgtataagacgagacactgggcaatatgtactaacactgaagaatgttgccggcactcggtctgtggccgttaattgcaaagtacttgataagcctggtccaccagcaggaccacttgaaataaatggcctcactgctgagaaatgctctctttcctggggacgtccccaagaagatggtggtgcagatatcgactattaccatcgtaaaaaacgtgaaacaagccaccttgcatggacaatatgtgaaggagagttacagatgacatcctgtaaagtaaccaagttactcaaaggcaatgaatatatatttagagtaactggtgttaataaatatggtgttggtgagcccctagagagtgtagctataaaggcactagatccatttacagttccaagtccacccacgtctttggaaattacttctgtgaccaaagaatctatgacactttgctggtcaagacccgagagtgatggaggtagtgaaatatctggatatataattgaaaggcgagagaaaaatagcctaagatgggtgcgtgtaaacaaaaaaccagtttatgatctaagagtgaaatcaacaggacttcgggaaggatgtgaatatgaatatcgtgtttatgcagaaaatgctgctggcctaagtcttccaagtgaaacctctcccttaattagggcagaagatccagtgttcctaccatctcctccatccaaacccaaaattgtggactcaggcaagacaactataactattgcctgggttaagccgctgtttgatggtggggccccgataactggatatactgtagaatacaaaaaatctgatgacactgactggaaaacttccattcagagcttacgagggacagaatatacaataagcggactaacaacaggagctgaatatgttttcagagtaaaatctgtcaataaggttggtgctagtgaccccagtgatagctctgaccctcagatagcaaaggaaagagaagaagaacctttatttgatattgacagtgaaatgaggaagaccttgattgtcaaggctggtgcctcatttaccatgactgtgcctttccgaggaagaccagtacccaatgtcttgtggagtaagccagacactgacctccgtactagagcttatgttgataccacagactctcgtacatcactgaccattgaaaatgccaacagaaatgactctggaaagtacacattaacaattcagaatgttttgagtgctgcttcactgaccttagttgtcaaagttttagataccccaggtcctccaaccaacattactgtgcaagatgtaaccaaagagtctgcagtgttatcctgggatgttcctgaaaacgatggtggagcaccagtgaagaattaccacatagaaaaacgtgaggccagcaagaaagcatgggtctctgtgaccaacaactgtaaccgcctctcctacaaagttaccaatttacaagaaggagctatctattacttcagagtctctggagaaaatgagtttggtgttggtataccagctgaaacaaaggaaggagtaaaaataacagaaaaaccaagcccacctgaaaaacttggagtaacaagtatatccaaagacagtgtttccctgacctggctgaagcctgaacatgatggcggaagcagaattgtacactatgtcgttgaagcactagaaaaaggacagaaaaactgggttaaatgtgcagtggcaaagtcaacccatcacgttgtttccggtctgagagagaattctgaatactttttccgagtgtttgctgaaaatcaagctggcctgagtgacccgagagagcttctgcttcctgttcttattaaggagcaactagaaccacctgaaattgatatgaagaatttcccaagtcacactgtatatgttagagctggttcaaaccttaaagttgacattccaatctctggaaaaccacttcccaaagtgaccttatcaagagatggtgtcccccttaaggcaaccatgagatttaataccgaaattactgctgagaacctgaccatcaatctcaaagaaagtgttacagctgacgctgggagatatgaaatcactgctgccaactccagtggtacaaccaaagctttcattaacattgttgtgctagacaggcctggtcctccaactggccctgttgttattagtgatataactgaagaaagtgtgactctcaaatgggagccacctaagtatgacggtggaagtcaagttaccaactacattctactcaaaagagaaacaagtactgcagtgtggactgaagtgtctgcaacagttgcaagaaccatgatgaaagtcatgaaactgaccacaggagaagaataccaattccgcatcaaggcagaaaaccgctttggcatcagtgatcatatagattcagcttgtgtgactgtcaaactaccatacacaacacctggaccaccatctacaccatgggtcactaatgttactcgagaaagcatcactgtgggctggcatgaaccagtgtcaaatggaggcagtgcagtcgtaggctatcacctggaaatgaaagacagaaacagtattttatggcaaaaagccaacaaactggtcatccgcacaactcacttcaaagtcacaacaatcagtgctggacttatttatgaattcagggtgtatgcagaaaatgctgctggagttggaaaacctagccatccttctgaaccagtcttggcaattgatgcttgtgaacccccaagaaatgttcgtatcactgatatttcaaagaactctgtcagcctttcatggcaacaaccagctttcgatggaggtagcaagattacaggctacattgttgagagacgtgaccttccagatggcagatggaccaaggccagcttcaccaatgttactgaaactcaattcaccatctctggcttgactcagaattcccagtatgaattccgtgtctttgctaggaatgctgttggttccattagcaatccatctgaggttgtagggcccattacttgcatcgattcttatggtggtcctgtaattgatttgcctctagaatatacagaagttgtcaaatacagagcaggtacatctgtgaagctcagagctggcatttctggcaaacctgcgcctactattgagtggtataaagatgataaagaattacaaaccaatgcactggtgtgtgttgaaaataccacggacctcgcatctatactcatcaaagatgccgatcgccttaatagtggatgctatgaattaaaactaaggaatgccatggcgtcagcctcagccaccatcagagtacagatccttgacaaaccaggcccacctggtggaccaattgaatttaagactgtaactgctgagaagatcacccttctctggcggcctccagctgatgatggtggtgcaaaaatcactcactacattgtggaaaagcgtgagacaagccgcgttgtgtggtctatggtgtctgaacatttggaagagtgcatcattacaaccaccaaaattatcaaaggaaatgaatacatcttccgggtccgagccgtgaacaaatatggaattggcgagccactggaatctgattccgttgtagccaagaacgcatttgttacacctgggccaccaggcataccagaagtgacaaagattaccaagaattcgatgactgttgtatggagcaggccaattgcagatggcggtagtgatataagtggctatttccttgaaaaacgagacaagaagagcctaggatggtttaaagtactaaaagagactatccgtgacaccagacaaaaagtaacaggactcacagaaaacagtgactatcaatacagagtttgtgctgtaaacgctgctggacagggtccattttctgaaccatctgaattctacaaagctgctgatcctattgatcctccaggtccacctgctaagataagaatcgcagattcaaccaagtcatccatcacccttggctggagtaagcctgtctatgatgggggcagtgctgttactgggtatgttgtcgagataagacaaggagaggaagaggaatggactactgtctctaccaaaggagaggtcagaactacagaatatgtggtatccaacctgaaacctggagtcaattactacttccgggtatctgctgtaaactgtgctggacaaggagaacctatagaaatgaatgaacctgtacaagctaaagatatacttgaggcaccagagattgacctggatgtggctctcagaacttctgttattgccaaagctggtgaagatgtacaagtgttgattccctttaaaggcagacctccacctactgtcacatggagaaaagatgagaagaatcttggcagtgatgccagatacagcattgaaaacactgattcatcctcattactcaccattcctcaagttactcgcaatgatacaggaaaatatattctcacaatagaaaatggagttggtgaacctaagtcttcaactgtgagtgttaaagtgcttgacacaccagctgcctgccagaaactacaggttaaacatgtttctcgaggcacagtcactttgctctgggatcctcctctcattgatggaggatctccaataattaattatgtcattgaaaagagagatgccaccaagagaacatggtctgtcgtgtcacacaaatgttctagcacatccttcaagctaatagatttgtcggagaagactccattcttcttcagagttcttgcagaaaatgaaattggaattggggaaccctgtgaaactacagagccagtgaaggctgctgaagtaccagctcctatacgtgatctctcaatgaaagactcaacaaagacatctgtcatcctcagctggaccaaacctgactttgatggtggtagcgtcatcacagaatatgttgtagaaaggaaaggtaaaggtgaacagacgtggtcccacgctggcataagtaagacatgtgaaattgaggttagccaacttaaggagcagtcagtcctggagttcagagtgtttgccaaaaatgagaaaggactgagtgatcctgtcactattgggccaattacagtgaaagaacttattattacacctgaagttgacctgtcagatatccctggggcacaagtcactgtgagaattgggcacaatgtgcaccttgaattaccttataagggaaaacccaaaccatccatcagttggctgaaagatggcttgccactgaaagaaagtgaatttgttcgcttcagtaaaactgaaaacaaaattactttgagtattaagaatgccaagaaggagcatggaggaaaatacactgttattcttgataatgcagtgtgtagaattgcagtccccattacagtcatcacccttggcccaccatcaaagcccaaaggacccattcgatttgatgaaatcaaggctgatagtgtcatcctgtcatgggatgtacctgaagataatggaggaggagaaattacttgttacagcatcgagaagcgggaaacttcacaaactaactggaagatggtgtgttcaagtgttgccagaacgactttcaaagttcctaatctagtcaaagatgctgaataccagtttagagtgagagcagaaaacagatacggagtcagccaaccacttgtctcaagcattattgtggcaaaacaccagttcaggattcctggtcccccaggaaagccagttatatacaatgtgacttctgatggcatgtcactaacttgggatgctccagtttatgatggtggttcagaagttactggattccatgttgaaaagaaagaaagaaatagcatcctctggcaaaaagttaatacatcaccaatctctggaagagaatatagagccactggactggtagaaggtctggattaccaattccgtgtatatgctgaaaattctgctggcctaagctcacctagtgacccaagcaaatttaccttagctgtttctccagtagacccacctggcactcctgactacattgatgtcacccgggaaaccatcacacttaaatggaacccaccattgcgtgatggaggcagtaagattgtgggctatagcattgagaaacggcaaggaaatgaacgctgggtgagatgcaactttactgacgtcagtgaatgtcagtacacagttacaggactcagtcctggggatcgctatgagttcagaataattgcaagaaatgctgttggaactataagcccgccctcacagtcttctggcattattatgacaagagatgaaaatgttccaccaatagtagagtttggccctgaatactttgatggtctcattattaagtccggagagagccttagaattaaagctttggtacaaggaagaccagtgcctcgagtaacttggttcaaagatggagtggaaatcgaaaagaggatgaatatggaaataaccaacgtacttggatccaccagcctatttgttagagatgctactcgggaccatcgtggtgtatacacagtggaagccaaaaatgcatctggttctgcaaaagcagaaattaaagtgaaagtacaagatacaccaggaaaagtagttgggccaataagattcaccaatattactggggagaagatgactctgtggtgggatgccccactcaatgacggttgtgctcccataacccactacatcattgaaaaacgggaaaccagcagacttgcctgggcactaattgaggataaatgtgaagcccaaagttacactgccattaaactaataaacggcaatgaataccaattccgtgtttctgcagttaacaagtttggtgttggcaggccacttgattctgatccagtggttgctcaaatacaatatactgttcctgatgcccctggcattccagaacctagcaacataacaggcaacagcattaccctgacatgggcaaggccagaatcagatggtggcagtgaaattcaacagtatatccttgaaagaagagaaaagaaaagcacaagatgggtaaaagtgatcagcaaacgaccaatctctgaaacaagattcaaagtcactggtctgacagaaggcaatgagtatgaattccatgtcatggctgaaaatgctgcaggagttggacctgcaagtggcatctcaagactcattaaatgtagagagcccgtcaacccaccaggtcctcccacagtggtcaaagtaacagacacatcaaagacaactgtgagcttagaatggtccaaaccagtgtttgatggtggcatggaaataattgggtatattattgaaatgtgtaagaccgacttaggagactggcacaaggtgaatgcagaggcatgtgtgaaaacaagatatacagtcactgatctacaagcaggtgaagaatacaaattccgagttagtgctatcaatggtgctggaaaaggcgacagctgtgaagtgactggcacaattaaagcagttgaccggttaacagctcctgagttagacatagatgcaaacttcaaacagactcatgttgttagagctggggccagtattcgcctcttcattgcctaccaaggtagacctactcctacagctgtgtggagcaaaccagactctaaccttagccttcgggctgatatccatacaacagattccttcagcaccctcactgtggaaaactgcaacagaaatgatgcagggaaatatacccttactgtggaaaacaacagtggtagtaagtcaatcacattcaccgtgaaagtgctagacactccaggcccacctggcccaattaccttcaaagatgtgacccggggatctgctacattgatgtgggatgcccctcttcttgacggtggtgcccgaatccatcattatgtggtagagaaacgagaggcaagtcgccgtagttggcaggttatcagtgaaaaatgcactcgtcagatcttcaaggtcaatgacctggccgaaggtgttccgtactatttccgtgtttctgcagtaaatgagtatggtgttggtgagccctatgaaatgccagaaccaattgtagccacggaacagcctgctccacctaggagacttgatgttgttgatactagcaaatcctccgcagtcttagcttggcttaaacctgaccacgatggaggcagccggatcactggctacctgcttgaaatgagacaaaagggatctgacctctgggttgaagctggtcacaccaaacagctaactttcacagtagagcgtcttgttgagaaaactgaatatgaattccgtgtgaaggccaagaatgatgctggctatagtgaacccagagaagccttctcttctgtcatcattaaggagcctcaaatcgagcccactgctgacctcactggaattaccaatcagcttataacttgcaaagcaggaagcccatttaccattgacgtaccaatcagtggtcgtcctgcccccaaagtaacatggaaactggaagaaatgagacttaaagagacagatcgagtgagcattacaacaacaaaagacagaaccacactgactgtaaaggacagcatgagaggtgactctggaagatacttcttgaccctggaaaatacagctggtgttaaaacatttagcgtcacagttgtggtcattggaaggccaggtccagtaaccggccccattgaggtctcatctgtctcagctgaatcgtgtgtcctgtcatggggagaacctaaagatggaggaggcactgaaattactaattacatagttgaaaagcgtgaatcgggtacaacagcttggcagcttgtcaattccagtgtcaagcgcactcaaattaaagtcactcatctcacaaaatacatggaatattctttccgtgtcagttcagagaacagatttggtgtcagcaaacctctagaatcagcaccaataattgctgaacatccatttgtcccaccaagcgctcctaccagacctgaggtctaccatgtgtctgccaatgccatgtctattcgttgggaagaaccctaccacgatggtggcagtaaaatcattggctactgggttgagaagaaagaacgtaatacaattctttgggtgaaagaaaacaaagtgccatgcttagagtgcaactacaaagtaactggtttagtagaaggactggaatatcagttcagaacttatgcactcaatgctgcaggtgttagcaaggccagcgaagcttcaagacctataatggctcaaaatccagttgatgcaccaggcagaccagaggtgacagatgtcacaagatcaacagtatcactgatttggtctgccccagcgtatgatggaggcagcaaggttgtgggctacatcatagagcgtaagccagtcagtgaggtaggagatggtcgctggctgaagtgcaactacaccattgtatctgacaatttcttcaccgtgactgctctcagtgaaggagacacttatgagttccgtgtgttagccaagaatgcagcaggcgtaattagcaaagggtctgaatctacaggccctgtcacttgccgagatgaatacgctccacccaaagccgaactggatgcccgattacacggtgatctggttaccatcagagcaggttctgatcttgttctggatgctgcagttggtggcaaacctgaacccaaaattatctggaccaaaggagacaaggagctagatctctgtgaaaaagtctctttgcagtatactggcaaacgagcaactgctgtgatcaagttctgtgacagaagtgacagtggaaaatacactttaacagtgaaaaatgccagcgggaccaaggccgtgtctgtcatggtcaaagtgcttgattcccctggcccatgtggaaagctcaccgtcagcagagtaacacaggagaagtgcactttagcctggagccttccgcaggaagacggaggagcagaaatcactcactacatcgtggaaagacgcgagactagcaggctcaactgggtgattgttgaaggcgaatgcccaaccctatcctatgtcgttaccaggctcatcaagaacaatgagtacatattccgagtgagggcagtaaacaaatatggccctggtgtgcctgttgaatcagagccaattgtagccagaaactcattcactattccatcaccacccggcatacctgaagaagttgggactggcaaagagcatatcatcattcagtggacaaaacctgaatctgatggtggcaatgaaatcagcaactacctagtagacaaacgtgagaaggagagcctgcgctggacacgtgtcaacaaagactatgtggtgtatgataccaggctgaaggtgaccagcctgatggagggttgtgattaccagttccgggtgaccgcagtgaatgcagctggtaacagtgagcccagcgaacgttccaacttcatctcatgcagagaaccatcatatacccctggaccaccttctgctccaagagttgtggataccaccaaacacagcattagtttggcatggaccaaacccatgtacgatggtggtactgacattgtaggatatgttctggaaatgcaagagaaggacactgatcagtggtaccgagtgcataccaatgccacaataagaaatactgaattcactgtgccagaccttaaaatgggccagaaatattccttcagagttgctgccgtgaacgtgaagggtatgagcgaatacagcgaatcaattgctgaaattgagcccgtggaaagaatagaaataccagatcttgagcttgcagatgatctaaagaagactgtgaccatcagggctggggcctccttgcgcttgatggtgtctgtatctggaagaccacctcctgtcataacgtggagcaagcagggcattgaccttgcaagccgggcaattattgacaccactgagagctactcattgctaatagtggacaaagttaatcggtacgatgctggaaaatacacaattgaagctgaaaaccaatctggcaagaaatcagcaacagtccttgttaaagtctatgatactcctggtccctgtccttcagtgaaagttaaggaagtatcaagagattctgtgactataacttgggaaattcccacgattgatggtggagctccaatcaacaattacatcgttgagaagcgtgaagctgctatgagagcattcaaaacagtaactaccaaatgcagcaagacactttacagaatttctggacttgtagaaggaaccatgcactatttcagagtgctgccagaaaatatttatggcattggagaaccttgtgaaacatctgatgcagtactggtctcagaagtgcctttggtgcctgcaaagctagaagtggtcgatgtcaccaaatccactgttacccttgcctgggaaaaaccactctacgatggtggtagccgactcactggatatgttctcgaggcctgcaaagctggcacagagagatggatgaaggttgtcaccttaaaacccacagtcctagagcacactgttacttccttaaatgaaggtgaacaatacttatttagaataagggcacaaaatgagaaaggtgtgtcagaaccaagagagactgtcacagccgtgactgtacaagacctcagagtgttgccaacaatcgatctttctacaatgcctcagaagaccatccatgtcccagctggcagaccagtagagctggtgatacctattgctggccgtccacctcctgctgcttcctggttctttgctggttctaaactgagagaatcagagcgtgtcacagttgaaactcacactaaagtagctaaattaaccatccgtgaaaccactatcagagatactggagaatacacacttgaattgaagaatgttaccggaactacttcagaaaccattaaagttatcattcttgacaagcctggtccaccaacaggacctattaagattgatgaaattgatgctacatcaattaccatttcctgggaaccacctgaattggacggtggtgctccactgagtggttatgtggtagaacaacgtgacgctcatcgtccaggatggctgcccgtttctgaatcagtgactaggtccacgtttaagtttaccagactcaccgaaggaaatgagtatgtgttccgtgtggctgcaacaaaccgcttcgggattggctcttacttgcagtctgaggtcatagagtgtcgcagcagcatccgtattcctggacccccagaaacattacagatatttgatgtttcccgtgatggcatgacacttacttggtacccaccagaggatgacggtggctcccaagtgactggatatattgtggagcgcaaagaagtgagagcagatcgatgggtccgtgtaaataaagtacctgtgacaatgacacggtaccgctccactggccttactgaaggcttagaatatgaacaccgtgtcacagccattaatgcaagagggtctgggaaaccaagtcgtccttccaaacccatcgttgccatggatccaattgctcctccaggaaagccacaaaacccaagagttactgatacaacaaggacatcagtctccctggcctggagtgttccagaagatgaaggaggatctaaagtcacaggctacttgattgaaatgcaaaaagtagatcaacatgaatggaccaagtgtaacaccactccaaccaagattcgagagtatactctaacacacctacctcagggtgcagaatacaggttccgcgtcctagcttgtaatgctggtggacctggtgagcctgctgaggtaccaggaacagtcaaagtcactgaaatgcttgaatatcctgattatgaacttgatgaaagataccaagaaggtatctttgtaaggcaaggtggcgtcatcagacttaccataccaatcaaaggaaaaccattcccaatatgtaaatggaccaaggaaggccaggatattagtaagcgtgccatgattgcaacatctgaaacacacactgagcttgtgatcaaagaagcagacaggggtgattctggcacttatgacctggttctggaaaataaatgtggcaagaaggctgtctacatcaaggtcagggtgataggaagtcccaacagtccagaagggccactggaatatgatgacatccaagtccgctctgtgagggtcagctggagacctcctgctgatgatggtggtgctgacatcttaggctacatcctcgagagacgagaagtgcctaaagccgcctggtataccattgattccagagtccgaggtacatctctggtggtaaaaggcctcaaagagaatgtagaataccatttccgtgtttcagcagaaaaccagtttggcataagcaaacccttgaaatctgaggaaccagtcacaccaaaaacaccattgaatcctccagaacctccaagcaatcctccagaagtactcgatgtaaccaagagttctgttagcttgtcctggtcccggcccaaagatgatggtggttctagagtcacaggctactacatcgaacgcaaagagacatccactgacaaggtggtcagacacaacaagactcagatcaccaccacaatgtacactgtcacagggcttgttcccgatgctgagtatcagttccgcatcatcgcacagaatgatgttggcctgagtgagaccagccctgcttctgaaccagttgtttgcaaagatccatttgataaaccaagccaaccaggagaacttgagattctttcaatatccaaagatagtgtcactctacagtgggagaaacctgaatgtgatggtggtaaagaaattcttggatactgggttgaatatagacagtctggagacagtgcctggaagaagagcaataaggaacgtattaaggacaagcaattcacaataggaggtttgctggaagctactgagtatgaattcagggtttttgctgagaatgagactgggctgagcagacctcgcagaactgctatgtctataaagactaaactcacatctggagaggccccaggaatacgcaaagaaatgaaggatgttaccacaaaattgggtgaagctgctcaactctcatgccagattgttggaaggcctcttcctgacattaaatggtacagatttggtaaagagctcatacaaagccggaaatacaaaatgtcttcagatggacgcacacacactcttacagtaatgacagaggaacaggaagatgaaggtgtttatacctgcatagccaccaatgaggttggagaagtagaaaccagtagtaagcttctcctgcaagcaacaccgcagttccatcctggttacccactgaaagagaaatattatggagctgtgggttccacacttcggcttcatgttatgtacattggtcgtccagtacctgccatgacttggttccatggtcagaaacttttgcaaaactcagaaaacattactattgaaaacactgagcactatactcatcttgtcatgaagaatgtccaacgtaagactcatgctgggaaatacaaagtccagctcagcaatgtttttggaacagttgatgccatccttgatgtggaaatacaagataaaccagacaaacctacaggaccaattgtgatcgaagctctattgaagaactccgcagtgatcagctggaaaccacccgcagatgacggaggctcctggatcaccaactatgtggtggaaaaatgtgaggccaaggagggggctgaatggcaattggtgtcttcagccatctcagtgacaacctgtagaattgtgaacctcacagaaaatgctggctattacttccgggtttcagctcagaacactttcggcatcagtgaccctctagaagtgtcctcagttgtgatcattaagagtccatttgaaaagccaggtgctcctggcaaaccaactattactgctgtcacaaaagattcttgtgttgtggcctggaagccacctgccagtgatggaggtgcaaagattagaaattactaccttgagaagcgtgagaagaagcagaataaatggatttctgtgacaacagaagaaattcgagaaactgtcttttcagtgaaaaaccttattgaaggtcttgaatacgagtttcgtgtgaaatgtgaaaatctaggtggggaaagtgaatggagtgaaatatcagaacccatcactcccaaatctgatgtcccaattcaggcaccacactttaaagaggaactgagaaatctaaatgtcagatatcagagcaatgctaccttggtctgcaaagtgactggtcatccaaaacctatcgtcaaatggtacagacaaggcaaagaaatcattgcagatggattaaaatataggattcaagaatttaagggtggctaccaccagctcatcattgcaagtgtcacagatgatgatgccacagtttaccaagtcagagctaccaaccaagggggatctgtgtctggcactgcctccttggaagtggaagttccagctaagatacacttacctaaaactcttgaaggcatgggagcagttcatgctctccgaggtgaagtggtcagcatcaagattcctttcagtggcaaaccagatcctgtgatcacctggcagaaaggacaagatctcattgacaataatggccactaccaagttattgtcacaagatccttcacatcacttgttttccccaatggggtagagagaaaagatgctggtttctatgtggtctgtgctaaaaacagatttggaattgatcagaagacagttgaactggatgtggctgatgttcctgacccacccagaggagtcaaagttagtgatgcctcacgagattctgtcaacttaacatggactgagccagcctctgatggtggcagcaaaatcaccaactacattgttgaaaaatgtgcaactactgcagaaagatggctccgtgtaggacaggcccgagaaacacgttataccgtgatcaacttatttggaaaaacaagttaccagttccgggtaatagctgaaaataaatttggtctgagcaagccttcagagccttcagaaccaaccataaccaaagaagataagaccagagctatgaactatgatgaagaggtagatgaaaccagggaagtctccatgactaaagcatctcactcttcaaccaaggaactctatgagaaatatatgattgctgaagatcttgggcgtggtgagtttggaattgtccatcgttgtgttgaaacatcctcaaagaagacatacatggccaaatttgttaaagtcaaagggactgatcaggttttggtaaagaaggaaatttccattctgaatattgctaggcatagaaacatcttacacctccatgaatcatttgaaagcatggaagaattagttatgatctttgagtttatatcaggacttgacatatttgagcgcattaacacaagtgcttttgaacttaatgaaagagaaattgtaagttatgttcaccaggtctgtgaagcacttcagtttttacacagtcataatattggacactttgacattagaccagaaaatatcatttaccaaaccagaagaagctctaccattaaaatcatagaatttggtcaagcccgtcagctgaaaccaggggacaacttcaggcttctattcactgccccagaatactatgcacctgaagtccaccagcatgatgttgtcagcacagccacagacatgtggtcacttggaacactggtatatgtgctattgagtggtatcaacccattcctggctgaaactaaccaacagatcattgagaatatcatgaatgctgaatatactttcgatgaggaagcattcaaagagattagcattgaagccatggattttgttgaccggttgttagtgaaagagaggaaatctcgcatgacagcatcggaggctctccagcacccatggttgaagcagaagatagaaagagtcagtactaaagttatcagaacattaaaacaccggcgttattaccacaccctgatcaagaaagacctcaacatggttgtgtcagcagcccggatctcctgtggtggtgcaattcgatctcagaagggagtgagtgttgctaaagttaaagtggcatccattgaaattggcccagtttctgggcagataatgcatgcagttggtgaagaaggaggacatgtcaaatatgtatgcaaaattgaaaattatgatcagtctacccaagtgacttggtactttggtgtccgacagctggagaacagtgagaaatacgaaatcacctacgaagatggagtggccatcctctatgtcaaagacattaccaaattagatgatggtacctacagatgcaaagtagtcaatgactatggtgaagacagttcttatgcagagctatttgttaaaggtgtgagagaagtctatgactattactgccgtagaaccatgaagaaaattaagcgcagaacagacacaatgagactcctggaaaggccaccagaatttaccctgcctctctataataagacagcttatgtaggtgaaaatgtccggtttggagtaactataactgtccacccagagcctcatgtaacatggtataaatcaggtcagaaaatcaaaccaggtgacaatgacaagaagtacacatttgagtcagacaagggtctttaccaattaacaatcaacagtgtcactacagatgatgacgctgaatatactgttgtggcaaggaacaaatatggtgaagacagctgtaaagcaaagctgacagtaaccctacacccacctccaacagatagtaccttaagacccatgttcaaaaggttactggcaaatgcagaatgccaagaaggccaaagtgtctgctttgagatcagagtgtctggcatccccccaccaacattaaaatgggagaaagatggtcagccactgtccctcgggcctaacattgaaattatccatgaaggcttggattattatgctctgcacatcagggacactttgcctgaagacacgggttattatagagtcacagccactaacacagctgggtccaccagctgccaggctcacctacaagtggaacgcctgaggtacaagaaacaggaattcaagagtaaggaggagcatgagcgacacgtacaaaaacaaattgacaaaaccctcagaatggctgaaattctttctggaactgaaagtgtaccactgacacaggtagctaaagaggctctgagagaagctgctgtcctttataaaccggctgtaagcaccaagactgtaaaaggggaattcagacttgagatagaagaaaagaaggaggagagaaaactccggatgccttatgatgtaccagagccacgcaagtataagcagactaccatagaagaagaccaacgcatcaagcagttcgtgcccatgtctgacatgaagtggtataaaaagatacgtgatcagtatgaaatgcctgggaaacttgacagagttgtacagaaacgacccaagcgcatccgcctttcaagatgggaacagttctatgtgatgcctcttccacgcattacagatcaatacagacctaaatggcgtattcctaaactgtcccaagatgatcttgagatagtgagaccagcccgccggcgtacaccttctcctgattatgacttttactaccgacctagaagacgttctcttggggacatctctgatgaagaattactcctccccattgatgactacttagcaatgaaaagaacagaggaagagaggctgcgtcttgaagaagagcttgagttaggtttttcagcttcacccccaagtcgaagccctccacactttgagctttctagcctacgttactcttcaccacaagctcatgtcaaggtggaggaaacaagaaaaaacttcaggtattcaacctatcacatcccaacgaaggctgaagctagtacaagttatgcagaactgagggaacggcatgcccaggctgcgtacagacagccaaagcaacggcaaagaatcatggctgagagggaggatgaagagttgcttcgcccagttacgaccacccagcatctctcagaatacaaaagcgaacttgacttcatgtcaaaggaggaaaagtctagaaagaaatcaaggcgacaaagagaagtgacagaaataacagaaattgaggaagaatacgaaatctcaaaacatgctcaaagagaatcatcctcatctgcgtctagactactgagacgacggcgctccctgtctccaacttatattgagttaatgaggccagtgtctgagctgatccggtcacgtccacaaccggctgaggaatacgaagatgacacagaaagaaggtcacctactccagagagaactcgcccacgatcccccagccctgtgtctagtgagagatcactctcgagatttgagaggtctgcaagatttgatatcttttccaggtatgagtccatgaaagctgctttaaaaactcagaagacatcagaaaggaagtatgaagttttgagtcagcagcctttcacactggaccatgcccctcgaatcacactgagaatgcgctcgcacagggtaccatgtggccaaaatacacgttttattttaaatgttcagtctaagccaactgccgaagttaaatggtaccacaatggtgtggaactccaagaaagcagtaagattcattacaccaacacgagtggagttctcaccctggaaattctggactgtcatactgatgacagtggaacctaccgtgctgtgtgcaccaactacaagggcgaagcttctgactatgcaacgttggacgtgacaggaggggattataccacctatgcttcccaacgcagagatgaagaggtccccagatctgttttccctgagctgacaagaacagaggcgtatgctgttccatcatttaagaaaacatctgagatggaagcttcgtcttctgtcagggaagtgaaatcacagatgacggagacaagggaaagtctctcctcatatgaacactctgcatctgcagaaatgaaaagtgctgcattagaagaaaagtcactggaagaaaaatccacaaccagaaagatcaagacgactttggcggcaagaattctaacaaagccacggtccatgaccgtctacgagggcgagtctgcaaggttttcttgtgacaccgatggtgagccggtaccaactgtgacctggctgcgtaaaggacaagtgctaagtacttctgcccgccaccaagtgaccaccacaaagtacaaatcaacctttgagatctcttcagtccaggcttccgatgagggcaattacagcgtggtggtagaaaacagtgaagggaaacaagaagcagagttcactctgactattcaaaaggccagggtaactgaaaaggctgtgacatcaccaccaagagtcaaatccccagagcctcgggtgaaatccccagaagcagttaagtctccaaaacgagtgaaatctccagaaccttctcacccgaaagccgtatcacccacagagacaaaaccaacaccaagagagaaagttcagcacctcccagtctctgccccaccaaagattactcagttcctgaaagcagaagcttctaaagagattgcaaaactgacctgtgtggttgaaagcagtgtattaagggcaaaagaggtcacctggtataaagatggcaagaaactgaaggaaaatgggcatttccagtttcattattcagcagatggtacctatgagctcaaaatcaataacctcactgaatctgatcaaggagaatatgtttgtgagatttctggtgaaggtggaacgtctaaaaccaacttacaatttatggggcaagcctttaagagtatccatgagaaggtatcaaaaatatcagaaactaagaaatcagatcagaaaaccactgagtcaacagtaaccagaaaaactgaaccaaaagctcctgaaccaatttcctcaaaaccagtaattgttactgggttgcaggatacaactgtttcttcagacagtgttgctaaatttgcagttaaggctactggagaaccccggccaactgccatctggacaaaagatggaaaggccattacacaaggaggtaaatataaactctctgaagacaagggagggttcttcttagaaattcataagactgatacttctgacagtggactttatacttgtacagtaaaaaattcagctggatctgtgtcctctagctgcaaattaacaataaaagctataaaagatactgaggcacagaaagtctctacacaaaagacttctgaaattacacctcagaagaaagctgttgtccaagaggaaatttcccaaaaagccctaaggtctgaagaaattaagatgtcagaggcaaaatctcaagaaaagttagccctcaaagaggaagcttcaaaggttctgatttctgaagaagtcaagaaatcagcagcaacctccctggaaaaatccattgtccatgaggaaatcactaaaacatcacaggcatcagaagaagtcagaactcatgctgagattaaagcattttctactcagatgagcataaacgaaggtcaaagactggttttaaaagccaacattgctggtgccactgatgtgaaatgggtactgaatggcgtagagcttaccaactctgaggagtaccgatatggtgtctcaggcagcgatcagaccctaaccatcaagcaagccagtcacagagatgaaggaatcctcacctgcataagcaaaaccaaggaaggaatcgtcaagtgtcagtatgatttgacactgagcaaagaactctcagatgctccagccttcatctcacagcctagatctcaaaatattaatgaaggacaaaatgttctctttacttgtgaaatcagtggcgagccatcccctgaaatcgaatggtttaaaaacaacctgccaatttctatttcttcaaatgtcagcataagccgctccagaaatgtatactcccttgaaatccgaaatgcatcagtcagcgacagtggaaagtacacaattaaggccaaaaatttccgtggccagtgttcagctacagcttccttaatggtccttcctctagttgaagaaccttccagagaggtagtattgagaacaagtggtgacacaagcttgcaaggaagcttctcgtctcagtcagtccaaatgtctgcctccaagcaggaggcctccttcagcagtttcagcagcagcagtgctagcagcatgactgagatgaaatttgcaagcatgtctgcccaaagcatgtcctccatgcaagagtcctttgtagaaatgagttccagcagctttatgggaatatctaatatgacacaactggaaagctcaactagtaaaatgcttaaagcaggcataagaggaattccgcctaaaattgaagctcttccatctgatatcagcattgatgaaggcaaagttctaacagtagcctgtgctttcacgggtgagcctaccccagaagtaacatggtcctgtggtggaagaaaaatccacagtcaagaacaggggaggttccacattgaaaacacagatgacctgacaaccctgatcatcatggacgtacagaaacaagatggtggactttataccctgagtttagggaatgaatttggatctgactctgccactgtgaatatacatattcgatccatttaagagggcctgtgccttatactctacactcattcttaacttttcgcaaacgtttcacacggactaatctttctgaactgtaaatatttaaagaaaaaaagtagttttgtatcaacctaaatgagtcaaagttcaaaaatattcatttcaatcttttcataattgttgacctaagaatataatacatttgctagtgacatgtacatactgtatatagccggattaacggttataaagttttgtaccatttattttatgacattttacaatgtaagttttgaaactaactgttggtaggagaaagtttcttatggaacgaataccctgctcaacatttaatcaatctttgtgcctcaacatactgttgatgtctaagtatgcctcagtgggttgagaaaatccccattgaagatgtcctgtccacctaaaagagaatgatgctgtgcatatcacttgatatgtgcaccaatacctactgaatcagaaatgtaaggcattggtgatgtttgcatttaccctcctgtaagcaacactttaacgtcttacattttctctgatgatgtcacacaaaattatcatgacaaatattaccagagcaaagtgtaacggccaacactttgttcgctcattttacgctgtctctgacataaggagtgcctgaatagcttggaaaagtaacatctcctggccatcccttcatttaaccaagctattcaagtattcctatgccagagcagtgccaactcttggaggtcccagagtgcagccaatgcctttgtgtggtagttctaaattttaattgcacctgaaaaacctgggcacctaagcaatgagccacagcaaaaagtaaagaacaacaacaaaataaagctgttgttaaattttaaacaatattactaattgcccaaaatgtcaatttgatgtagttcttttcatgcaagtataaattcaattgttagttataattgttggacctccttgagatagtaacaacaaaataaagcaagctatctgcacctcaaaaaaaaaa

SEQ ID NO: 145 - DNA, 947 bp, Homo Sapiens
aattgagtatctggcaagagtaagattaagcagtaatttgttccaaagaagaatcttctaccaaggagcaactttaaagaatgaaattaactttcttcttgggcctgttggctcttatttcatgtttcacacccagtgagagtcaaagattctccagaagaccatatctacctggccagctgccaccacctccactctacaggccaagatgggttccaccaagtcccccacctccctatgactcaagacttaattcaccactttctcttccctttgtcccagggcgagttccaccatcttctttctctcgatttagccaagcagtcattctatctcaactctttccattggaatctattagacaacctcgactctttccgggttatccaaacctacatttcccactaagaccttactatgtaggacctattaggatattaaaacccccatttcctcctattcctttttttcttgctatttaccttcctatctctaaccctgagccccaaataaacatcaccaccgcagatacaacaatcaccacaaatccccccaccactgcaacagcaaccaccaggcacttccacaaaacccacaatgacgatcagctcctcaacagtacctatctcttcaacaccagagcctgccacctccatatcagcagcaacccccgcagcatctactgaaaatactactcaaattctcgccaaccgtcctcacacagtattgctcaatgccactgtccaagttacgacttccaaccaaactatattaagcagcccagcctttaaaagtttttggcaaaaactctttgccatttttggttgaacatgcaataaatgatattttccaaactgctctgatatcttagaagaaataaactgcaatgattttgatggaaccaaccctgatctaaccagcacactaaataaagtatttgagcaata

SEQ ID NO: 146 - DNA, 213 bp, Homo Sapiens
ggtcgacacaaaactcgccaagctcgccttctggctcctggcggttccggccgtggcgccagaagcgggtgtgtaaatatgtgtgaacaagcgcttctaatcaaacggaggcggctgctcagtccagaagatatgaataaactcatgtttctgaaatccaacatgctttaagacttgacttcgggggaaaaaaaaaaaaaaaaaaagtcgacg

SEQ ID NO: 147 - DNA, 490 bp, Homo Sapiens
ttttcctgaacgtgggtcacaggggtctttttgaagttcccttgttctttcacaagaatgaactgtatccaagatttttgataggctagttgaatcttctaattttccacttattttatccatttctttttgatgtgtagccttgggtacacacacatccttctgtgaaacagtctcacggagactctcagaatcccaagaattttcttcaacgttcttttgttttgattctgaagggaacatctgatctgctctcaatgtttgttcattcttcaattccaaggctttatttggaacagacttttgcatttcaatggcaggctcgaaggcagatggcttctcgggaggctctgctttgaaagtttgcatgtccatcaattctaaggctttagttggaatagaaactttcattctgcagggagccttcagaaaaccatcattatcaggagactcttctaattttccatttattttatctatttctttttga

SEQ ID NO: 148 - DNA, 446 bp, Homo Sapiens
tttccgaggtggagtctcactctgtcacctaggctggagtgcagagcgagattctggttggattgaatgatgtctgctgcatcatcagggtagatgggaatcctgtgcagctttatgcaattcgtgaacaagtaattcttcacactgttattttatgtctgtaggcttcaggaagaaatcatgaatttttcttctaaaataagtattctgttgacacagactattggtaagattttcaacataaggtgatgctaggactggcctcctagcatgagttgtgagtaaagatctggtctgttgtttctccaaaagaagtttcttactgcttgtctctcatgagttttctgtttctgctttctctttttcatattgatatatacggttttttaaatggttattgtaattaaatatctcctcatttttctcttttaggagatgatgttgca

SEQ ID NO: 149 - DNA, 521 bp, Homo Sapiens
  misc_feature (80)..(80): n is a, c, g, or t
  misc_feature (452)..(452): n is a, c, g, or t
gatgttttagtgttatgttttttgagacagagtccagctctgttgcccaggatggagtgcagtggtgtgagcatagctcnatgctgtcttgaacttccaggctcaagtgatcctcccacctcagtctcctgaatagctaggaccacaggcatgcaccatcatgcctggctaatttttaaatttctgtagaaactgggtctccctttgttatccaggctggtctccaactcctgggctcaagtgatcctcctcccttggcttcccaaagtgttgagattacgggcatgagccactgtgccaggccaacattgtttttaatatatgacttgtaaggcaagttggggggcattaattccttattaagatgtactgagttgaataaaagcccctccaaccatcaaccccccaaaatatatggtccaagtactaagctccagaatttggtgaatgcnaactaatttgggataaagagtatttgcatgtaattaagggaaagattcttgagattagatcctataaat

SEQ ID NO: 150 - DNA, 493 bp, Homo Sapiens
  misc_feature (4)..(4): n is a, c, g, or t
  misc_feature (287)..(287): n is a, c, g, or t
  misc_feature (306)..(306): n is a, c, g, or t
  misc_feature (410)..(410): n is a, c, g, or t
  misc_feature (417)..(417): n is a, c, g, or t
  misc_feature (425)..(425): n is a, c, g, or t
  misc_feature (463)..(463): n is a, c, g, or t
tttnaccatgttgctcagggtggtctcgaacgcctgagctcaggaatccacctacctcagcgtcccaaagtgctgggattacaggcaagaaccatcgcgtccgaccctaacttttcattttctgtttggaataaaaacctataccaactataaacacacacacacacacacaattgccatttataattgtagtttattggcaaggatggtctaagtttgccaggtctaagtgttgtaggtgaagggtgctacaaatgagatacaacttcagaagacatctctagggnctaaagactttacattggncaggcagcaactttttcctgcttgttaattttagacctgacagttgaatttatgttttgaggcaattttagctggataaatgcctttttttaagttaccttccncttttgngcattttnatttttacttttcgttttttaaaaaattggcaattgtngaatgaatggtggcttattaaattaggctg

SEQ ID NO: 151 - DNA, 447 bp, Homo Sapiens
tctttttttcttcttcttgagacaagagtctcgctctgttgcccaggctggagtgcaatggctcaatctcagctcactgcatcctccacctcccaggttcaagtgattctcatgtctcagcctcccaagtaactgggattacaggtgcacaccaccccacccagctaatttttgtatttttagtagagatggggtttcaacttgttggccaggctggtcttgaactcctggccccaggtgatccacccactttagcctctcaaagtgttgggattacaggcatgagccactgcgcccagcctggaagttaatttttatggttgtgtatgtgttgcttgtcactagaatgatggctgtgtggggcaggtttttgtctgtgttattccttgctgaatgcccaggcctggcacagggtgagtactccatagatgaatggatgaacaaatg

SEQ ID NO: 152 - DNA, 451 bp, Homo Sapiens
  misc_feature (13)..(13): n is a, c, g, or t
  misc_feature (18)..(18): n is a, c, g, or t
ttttgagacgganccgcntctgtggcccaggcgggagtgcagtggcgcaatctcggctcactgcaagctccgcctcccgggttcacgccattctcttgcctcagcctcccgagtagctgggactacaggcgcccgcatcacgcccggctaatttttttttgtatttttagtagagacggggtttcaccgtgttagccaggatggtctcgatctcctgacctcgtgatccacccgcctcggcctcccaaagtgctgggattacaagcgtgagcaccacgcccggccaagatttctttaacactccagcaatcagcctcttccttctcttttttcatttaaatctgatagttacaaaatctggtagaactggtgtgcagtattacaaaacattattgtggactgctttttactttaatttacacaaacacaaaaactgctcaaatttgaggta

SEQ ID NO: 153 - DNA, 437 bp, Homo Sapiens
tttcacatccaatatggaatatttattgttaaaaaaaaaacccaaaagacaaaaaaaacagtacatcacaagtggcaaaaatgtgcagaaatgggagacttatgttctgttgctggaaatgtataatggtgcaaagaagtatgggccaggtacggtggctcacgcctgtaatcccagcactttgggaggctgaagcgggtagatcacctgagaccaggagttggagaccagcctggccaacatggtaaaaacctgtctctattaaagaagtacaaaaattagatgggtatggaggcacacgcctgtaatcccagctacttgggattacaggcacacgacaccacacctgctagtttttatatttttagtaaagatggggttttaccttgtttgccaggctggtcttgaactcctgacctcaagtgatccgccagcct

SEQ ID NO: 154 - DNA, 434 bp, Homo Sapiens
ttttttttttttttttttttttgagatatggtctggctctgttgcccaggctagagtgcggtggcaaattttggctcactgcaacctccgcctcctgggctcaagccatcctcctacctcagcctcctaagtagctggaaccaaaggcacatgccatcatgtccagctaatttttgcattttttgtagacacaggatttcaccatgttgccaggctggtcttgaactcctgaactcaagcaatctgcccacctcggcctcccaaagtgctgggatcatatgcatccatcactgcgcctggccaacatttttttttttaactatcatcctagagttcaagtagataaacgtttttatgcaacttaaccagaaagacattcagaaattggtaattatgtgtggagggttgaattatgtccccacaaaaattcatgc

SEQ ID NO: 155 - DNA, 456 bp, Homo Sapiens
ttaaaaaagaaaaaagaaaataaggcaggccggcttctcacattacatgcttttagaaaaaggtctcatccttgaagcagctttgttatatgcagagcacagtactggcttcaaaaaatatataaaggttctgtgcactggcactgtttacatgtgaagaattgccatcaacttctgtgaaaattagcaagctggcacagtggctcacgcctgtaatctcagcacctcaggaggccgaggtgggcggatcacctgaaggtgggagtttgagaccagcctgaccaacatggagaaaccccatgtctactaaaaatacaaaattagtcaggcatggtggtgcgtgcctgtaattccagctattcgggaggctaaggcaggagaatcgcttgaacccaggaggcagaggctgtggtgagctgaaatagcaccaccgcactccagcctgggcaatgagag

SEQ ID NO: 156 - DNA, 324 bp, Homo Sapiens
aggaaaaaaaatattcctacttaaattttaagtctataattcaatttaaatatgtgtgtgtctcatccaggataggataggttgtcttctattttccattttacctatttactttttttgtaagaaaagagaagaatgaattctaaagatgttccccatgggttttgattgtgtctaagctatgatgaccttcatataatcagcataaacataaaacaaattttttacttaacatgagtgcactttactaatcctcatggcacagtggctcacgcctgtaatcccagcacttggggaggacaatgtggggtggatcacgaggtc

SEQ ID NO: 157 - DNA, 376 bp, Homo Sapiens
ttttttttcaacaacaaaaaggacctttattctggaggcaaatcccaaacagcaaagcaagcgagtatggcaggctgagcagcacggcccatggcacgaggagggctcacttttcaaagttccaaatagggcaaaatgtgtgtttccctaggaagtattttttaaaaacatttttgagatagagtcttgctctgtcacccaggcgagacgcaggggcaagatcatggctcactgcagcctccaactcctgggctcaagcagtcctcccaccttggcctcccaaagtgctgtgataacaggtgtcaaccaccacacccagtcagggctcacttttcaaagccccaaacagaaggcattgggcaaaatgtgtatttct

SEQ ID NO: 158 - DNA, 299 bp, Homo Sapiens
atttgcccacagaaccctctaaatccccttgtaaatttaactgttagtccaaagaggaacagctcttttggacactaggaaaaacccttgtagagagagtaaaaatttacaccatagtaggcctaaagcagccaccatttagaagcgttcaagctcaacaccactacctaaaaatccaacatatactgactcctcacaccattgacactctatcacctatagagactatgttagtatagtacatgaacatctctcgcatagctcgtcagattacactactacattacagccattctcat

SEQ ID NO: 159 - DNA, 398 bp, Homo Sapiens
ttttggatgagtatagagagggagagtgagttgcctaaagctacacacccagtcagagttacaggccagtgccccaggatttgtttcttttttattgttttgagatggagtcttgctctatcacccaggctggggtagagtggcgccatctgagcccactccacctctgcatcccaagttcaagtgattctccttcctcagcctcccggccctgcctaatttttgtatttttagtagagacagggtttcatcatgttggccaggctggtctcaaactcctgacctcgcgtgatctgcccacctcagccttcaaaagtgttgggattacaggcatgagccaccgtgcctggccaccccaggaatatttgataacatcaacatcaaatcattcctgcctg

SEQ ID NO: 160 - DNA, 186 bp, Homo Sapiens
  misc_feature (11)..(11): n is a, c, g, or t
  misc_feature (147)..(147): n is a, c, g, or t
aaaaaaatgtnttctgtggccataagttttcattgatagagaagcataaatttggtgaatttagaattaggtcttttatcatatcctataaaaagttgagttaacaggctgggcacggtggctcatgcctgtaatcccagcactttnggaggccaaggcagctggatgccccaaggtcaggcattt

SEQ ID NO: 161 - DNA, 417 bp, Homo Sapiens
tttttagatggagtctccttctgttacccaggctggagtgcagtggccagatcttggctcactgcaacctctgcctcccgggttcaagcaattctctgcctcagcctcccaagtagctgggattacaggcgcccccaccatgcctggctaatttttgtatttttagtagagacctggtttcaccatcttggccttgaactcctgaccttgtgatccactggccttggctctcaaagttctgggattacaggtgtgagccatcgtacccggcagccctggtttcttcttagttttattggtctgtgttttgatcagcacagtcacttttttgttctctttcctggtaagcagggagtcaaaacaatagcaagaaaatgccagaaatagaatttctactactttgtaaactctaggctc

SEQ ID NO: 162 - DNA, 350 bp, Homo Sapiens; identical to SEQ ID NO: 11

SEQ ID NO: 163 - DNA, 452 bp, Homo Sapiens
  misc_feature (112)..(112): n is a, c, g, or t
ctttctcctccctcttggggctcaaattgggtgccctggtgaaggaggggggcacactccagaacctagtccaaccccagacgctgcctgaggcttccctccagctcccctncccttccttttctccctttcctccctccctctctttccctttctccctccccgctaaggctggcgtgccagggggtgggacatgccaatcactggctgtgcctctcccgctgccagcacagggcgcagctccccctgggagccaggtgtttgggtccctggagacgccgcaggcccccagggaggcagtggggctgaggaccctacagacccctcttcagccccgtggtgatgactttcccctgaggaagccctgtagcgtgcctggaggaaggggctctccaaccccagccccacctagccaccatgaacacttcagccccacctgctgtcagccccaa

SEQ ID NO: 164 - DNA, 409 bp, Homo Sapiens
ctcaagtcttgtatgggactcaagattggagacacggtgaggtgggctgggcagggcctttgtcctggagcatctgtgggcacccaaccccctttcttccttttgtagtgactaaaaatggcccccttccaccagaaaaaaaaatatgggcaagaaaaatacgtttcctgaaagtcattctaagttagatgtaatggatccaccaatcttttcctctgaggcttctgttgcgtaaccgatttctgttacgtgaacttcactctcaggaatttgaaaaacttacaatttggttacctttgtttgtgtatgcacagttgattgcaaaggaaaatatttctttaccttcagtccctcaccagtcgccagcctttccaaggtgagcttcagcattgaggccaaggtgcgaggc

SEQ ID NO: 165 - DNA, 947 bp, Homo Sapiens; identical to SEQ ID NO: 145

SEQ ID NO: 166 - DNA, 1182 bp, Homo Sapiens
gaattccggaagacacttgaaactgatacagttacaggtaagtctggtgagaagattgactactctacaacacctcgaattgatgaatggcgtgacaagggttatcgcttagttgaagatggtttcgctgaagcaggcacaccggtttatgatgataatgatgatgtcgaacaaatctttatcgttaaattggatcatgatactgcaccagttgggccaaatgatccacatgaaccagaaacaccaatcaatccaaacgatccaaatggaccaaagtggccagctaaggatagctacacaaaacaatatacgtcaacggttcattttgtagatgaaaacggtaataaactacacgattataacgttcaaacatcaaattggacacgaacattgattgtcgataaggctactggtgaaatcttgaatccagatgaagcatggcattctgatattgataagtattctgatgtcaaagttgatcctattaagggctactatactgaccgcaatagtgtaccaggtgaagtagcacaacaacaagatattgtgaatacggttgtttataagcaaattggtaagattgtaccggttgatccatcaggaaacccaattccagatgcaccaacaccacaatacagaaacaatcctaacgatccaactaaggttatcgtaacgaatacgccagaaattccaggtatgacaccagaagtaccaagtgttacaccagaaaatccaggtgaagatacaccaattgtttacaacaaggttgaaacaccaacaccaaagacagtagatgtgacaccagaaacgccgaaaacagtcgacgttacgtcagaaacaccaaaggcaacaccagttaaaactgcgcctcaagttgaaaaagttaaggcgccagaattaccacaaactggtgaaaagcaaaataaggcgttaactgccgtcggtgcatctattatgactggtctattaggaatccttgcctttgctaagaaaaagaaggatgacaaagaaatctagtcatttggtttaagaaagaagagtcgaaagactctttttttattggtgtgcgtgataataggttaattattttttggtaatatctcatgaaaaactatgcataattttaggtgcaaattagccaacgatatatcaatatttttatataatagttgcccggaattc

SEQ ID NO: 167 - DNA, 647 bp, Homo Sapiens
gaagggccgggcggcaacaacacaggttgggtgcggccaggcttgtaggtgcggcgaccatctgcagagggagcgtgccgggatagtgggtggcgtgcagggctggggcatcggctggcagcagcgttcaggtgtgacccgagttggcggtacgggcccagagcccctgcgtctccactgtgcccctgcggggaggggacaggagggcaagcggcctgcagacgcgtctggggcaggcctggcacggcgtgcgagggtccggtgggtggcccaggtggaagcggcagtgctggcacggggaggggaagttggcacgtggggtgggtggctgccgggcgcggtctagtggctgccgctggagtcagggcgaggctggctcgtggcgaggtatttggctctcatgctggaggtgtatgagggcggcggggactcgcgcccaatgagtggggtgttctcacagcgggggttctggaaattagcgttctggctcatgtactcagtgaccggggcgttgctgacggtgtgggccgcggcgggatgctggtctcactgccgtagctgctgccacagctgtacaggctgggcatgtggacgcggtaaaggctgtcgtgcgcctgcggggccctggagcgggctccttcttcccg

SEQ ID NO: 168 - DNA, 305 bp, Homo Sapiens
ttttttttttttttttttttttttttttttttttaaaatgaaacatttttattcattcattttaagatttacagcaatggcaattaacaatatagaccaaaagcttcgaatttagctgcatacttttaaaaaatggtaagaagtaaaagatgctttaaaagctatccatctcagttcttaaatggcatctaaaccttagaagtcaaatgttacagcaaatatttgtaaaagcaactgtaaataaaaccgaacgcaaccacagcataatataaccatgtagccatagatatatgataaatataaac

SEQ ID NO: 169 - DNA, 2197 bp, Homo Sapiens
caggaagcccacccagccccgccacgcagagcccagaaggaaagaaagcctcatgcctgagccgaggggagcaccatggatctgacaaaaatgggcatgatccagctgcagaaccctagccaccccacggggctactgtgcaaggccaaccagatgcggctggccgggactttgtgcgatgtggtcatcatggtggacagccaggagttccacgcccaccggacggtgctggcctgcaccagcaagatgtttgagatcctcttccaccgcaatagtcaacactatactttggacttcctctcgccaaagaccttccagcagattctggagtatgcatatacagccacgctgcaagccaaggcggaggacctggatgacctgctgtatgcggccgagatcctggagatcgagtacctggaggaacagtgcctgaagatgctggagaccatccaggcctcagacgacaatgacacggaggccaccatggccgatggcggggccgaggaagaagaggaccgcaaggctcggtacctcaagaacatcttcatctcgaagcattccagcgaggagagtgggtatgccagtgtggctggacagagcctccctgggcccatggtggaccagagcccttcagtctccacttcatttggtctttcagccatgagtcccaccaaggctgcagtggacagtttgatgaccataggacagtctctcctgcagggaactcttcagccacctgcagggcccgaggagccaactctggctgggggtgggcggcaccctggggtggctgaggtgaagacggagatgatgcaggtggatgaggtgcccagccaggacagccctggggcagccgagtccagcatctcaggagggatgggggacaaggttgaggaaagaggcaaagaggggcctgggaccccgactcgaagcagcgtcatcaccagtgctagggagctacactatgggcgagaggagagtgccgagcaggtgccacccccagctgaggctggccaggcccccactggccgacctgagcacccagcacccccgcctgagaagcatctgggcatctactccgtgttgcccaaccacaaggctgacgctgtattgagcatgccgtcttccgtgacctctggcctccacgtgcagcctgccctggctgtctccatggacttcagcacctatggggggctgctgccccagggcttcatccagagggagctgttcagcaagctgggggagctggctgtgggcatgaagtcagagagccggaccatcggagagcagtgcagcgtgtgtggggtcgagcttcctgataacgaggctgtggagcagcacaggaagctgcacagtgggatgaagacgtacgggtgcgagctctgcgggaagcggttcctggatagtttgcggctgagaatgcacttactggctcattcagcgggtgccaaagcctttgtctgtgatcagtgcggtgcacagttttcgaaggaggatgccctggagacacacaggcagacccatactggcactgacatggccgtcttctgtctgctgtgtgggaagcgcttccaggcgcagagcgcactgcagcagcacatggaggtccacgcgggcgtgcgcagctacatctgcagtgagtgcaaccgcaccttccccagccacacggctctcaaacgccacctgcgctcacatacaggcgaccacccctacgagtgtgagttctgtggcagctgcttccgggatgagagcacactcaagagccacaaacgcatccacacgggtgagaaaccctacgagtgcaatggctgtgacaagaagttcagcctcaagcatcagctggagacgcactatagggtgcacacaggtgagaagccctttgagtgtaagctctgccaccagcgctcccgggactactcggccatgatcaagcacctgagaacgcacaacggcgcctcgccctaccagtgcaccatctgcacagagtactgccccagcctctcctccatgcagaagcacatgaagggccacaagcccgaggagatcccgcccgactggaggatagagaagacgtacctctacctgtgctatgtgtgaagggaggcccgcggcggtggagccgagcggggagccaggaaagaagagttggagtgagatgaaggaaggactatgacaaataaaaaaaaaaaaggaattc

SEQ ID NO: 170 - DNA, 266 bp, Homo Sapiens
tttttttttttttttttttttttttttttttttttaccagggaaagggtttaatagttaaattatttaaatagacttttcaatttccatgggaaataataatcgtatttgtttttgcaagagtgggaataaaaagagggcacaccctttagagggaacgaaaagctagcactggacctgcacactgtcaccagtcactggtgggatgggagaggggtccccatggggccgggaagccatgaccatgggagaacatgggatgaactc

SEQ ID NO: 171 - DNA, 600 bp, Homo Sapiens
tttgtgtataaaaaagtgatatgtctttaatttaaaattatgacccggaaataactagtcagtttaagtgatccagacttcctcttcatacccaaatggaacagacacaatattggctcagatttccaaccccagaaaaaaaccaaaccaagtcctcaggaagtccctgcagcgaccttgctggggccatcagaccgcacagagtggaggtgcccaagctgctaggctgctcttaatccagccacactgaaaagaagctttccttctaccagcaactccctcgctgggtccgatatcccccttcacctcccttttagctggcactgcacgaatgcctccacagagaggctgacagtacagcagtcacctcccagctgtcttcggtgcatcttcagggccaccttcctgtggtcacaatagaggagttgagcattctaaacgttcgtgcccaggagggcagcgtcttctctttttagctgaggtctggagccctgagttgtaaccattggtcatatgtggctgaggcaccgacagcaaatcgccaaacttgggaaacgatctggggagatgcaagggccttggtaattgatggtgagtagt

SEQ ID NO: 172 - DNA, 421 bp, Homo Sapiens
ttttttttttttttttttttttgttttatacaacaggttttattgaggatgtgtcaatacagttaacatggttgcttgtcttttcaaaaagaagttccattttctttgattcccaagtgcatttttcctgaatcttctgtgatacagggcacatgataggtatgtagagagctaagcttcctataccaagttagaagtgaaatgactaggggaaaacatttaaactttaatcttaaaaaaaaaaataggaatcaatataaaaatgcacaaggtaatgtcgttttcatagttaaaatctgacattgtttatcaaagctagtcagttaagtggacacctgcaactcaaatcccataaacattttagaaacgccaaccacccctcctgaaaggtttgaggaatgaaatttggcagaagctcagc

SEQ ID NO: 173 - DNA, 1070 bp, Homo Sapiens
gcgattgctggggctgcagcgctgcctccgagaccgagagtgggtggagcgggtcttcctggaagggtgcgataaggccgggcgaggtgcctgggatgcttctccccttccgcgaggaagagatctaattgggtagggcgggtgtagactagcctgccgagccgcccgctggcacctgcagcctcctgggcgcccgcgggcccggcgagaaagttgttaaagggagcgaggtggttgttcctggggtccgaggcgcgcctctcacgccctgcccaacagaagccgcagtcccgtggggtctggagacgcagtttccttgttaatgacaataaatccctgctccccctgcctcagacatctacgcagcgaaatcgagcctggccttgagggtccacaccgcgaggaagatgcgtgcgcccattccagagcctaagcctggagacctgattgagatttttcgccctttctacagacactgggccatctatgttggcgatggatatgtggttcatctggcccctccaagtgaggtcgcaggagctggtgcagccagtgtcatgtccgccctgactgacaaggccatcgtgaagaaggaattgctgtatgatgtggccgggagtgacaagtaccaggtcaacaacaaacatgatgacaagtactcgccgctgccctgcacgaaaatcatccagcgggcggaggagctggtggggcaggaggtgctctacaagctgaccagtgagaactgcgagcactttgtgaatgagctgcgctatggagtcgcccgcagtgaccaggtcagagatgtcatcatcgctgcaagcgttgcaggaatgggcttggcagccatgagccttattggagtcatgttctcaagaaacaagcgacaaaagcaataactgaaaaagactgtctgtcagcgatgactttatacatcaagggggtcttgttttgctagagagtttggggtttggtttgtggatttcattgtgatttataataaggcttattttcacagaataaaataaagcaaaacgagggaggattttattgggggagtgcagcccaaaaaa

SEQ ID NO: 174 - DNA, 431 bp, Homo Sapiens
  misc_feature (21)..(21): n is a, c, g, or t
tttttttttttttttttaaanttttcagttgtttattggaaactatagatttttttaaaactcactaattattttgccatacaagagcaaaattcaagtaatacaaatatttaacattttggtataaaattaacaatatggaaaaaagatgcaaaccaaccaaaaggtaaaaaaattttaacaataacactgtgtataaccatcttctattcaagtgaccatccaagctgatagtttattttccctttgttgacattttttaaaaagatagccctacactggagcaccaaaaagttttttccttcttttttaaaaggttggaacccttttatttacagatactcttctcagtactttaagtaagtgtgatgaaggaatcatctagcaacttccttcttagaaaaaaaggaagtgccttcatatttccttga

SEQ ID NO: 175 - DNA, 238 bp, Homo Sapiens
tgtataggaatgttccaccatacatgatacatgatcatatctaagatgtcagcatgttcataaagaggattatttgtgtaaaactattaatagttatgcttttcccgagcattgtctcatctttgaattcaaattattctcttttaaagcatcattctttgttttatactaaaaattaccagatacttgctgttaaaacctacttggtatttcatacaacatcaagttattgctacat

SEQ ID NO: 176 - DNA, 2147 bp, Homo Sapiens
gctgccctccccgtcagccgccctcgccgccgcggtgcgctggctgcaggaagccgccgcgccgccgcttttgttgtcagggacccagcgaggagcgccgctcgccggccgccgccaccctctctcgctgcagcctgctgtgcgctgcacggcctggggcccgggcgcccccgcgtctgcccatgagggggccccgcgaccaccgctgcttccagcccggggcggcgcggcgctgaggcggcggcggcggcggcctgccccctctgcgggaagcgggcggccccggccgcctccgcgagggcaccatggaggtgaatgcaggaggtgtgattgcctatatcagttcttccagctcagcctcaagccctgcctcttgtcacagtgagggttctgagaatagtttccagtcctcctcctcttctgttccatcttctccaaatagctctaattctgataccaatggtaatcccaagaatggtgatctcgccaatattgaaggcatcttgaagaatgatcgaatagattgttctatgaaaacaagcaaatcgagtgcacctgggatgacaaaaagtcatagtggtgtgacaaaatttagtggcatggttctactgtgtaaagtctgtggggatgtggcgtcaggattccactatggagttcatgcttgcgaaggctgtaagggtttctttcggagaagtattcaacaaaacatccagtacaagaagtgcctgaagaatgaaaactgttctataatgagaatgaataggaacagatgtcagcaatgtcgcttcaaaaagtgtctgtctgttggaatgtcaagagatgctgttcggtttggtcgtattcctaagcgtgaaaaacagaggatgctaattgaaatgcaaagtgcaatgaagaccatgatgaacagccagttcagtggtcacttgcaaaatgacacattagtagaacatcatgaacagacagccttgccagcccaggaacagctgcgacccaagccccaactggagcaagaaaacatcaaaagctcttctcctccatcttctgattttgcaaaggaagaagtgattggcatggtgaccagagctcacaaggatacctttatgtataatcaagagcagcaagaaaactcagctgagagcatgcagccccagagaggagaacggattcccaagaacatggagcaatataatttaaatcatgatcattgcggcaatgggcttagcagccattttccctgtagtgagagccagcagcatctcaatggacagttcaaagggaggaatataatgcattacccaaatggtcatgccatttgtattgcaaatggacattgtatgaacttctccaatgcttatactcaaagagtatgtgatagagttccgatagatggattttctcagaatgagaacaagaatagttacctgtgcaacactggaggaagaatgcatctggtttgtccaatgagtaagtctccatatgtggatcctcataaatcaggacatgaaatctgggaagaattttcgatgagcttcactccagcagtgaaagaagtggtggaatttgcaaagcgtattcctgggttcagagatctctctcagcatgaccaggtcaaccttttaaaggctgggacttttgaggttttaatggtacggttcgcatcattatttgatgcaaaggaacgtactgtcacctttttaagtggaaagaaatatagtgtggatgatttacactcaatgggagcaggggatctgctaaactctatgtttgaatttagtgagaagctaaatgccctccaacttagtgatgaagagatgagtttgtttacagctgttgtcctggtatctgcagatcgatctggaatagaaaacgtcaactctgtggaggctttgcaggaaactctcattcgtgcactaaggaccttaataatgaaaaaccatccaaatgaggcctctatttttacaaaactgcttctaaagttgccagatcttcgatctttaaacaacatgcactctgaggagctcttggcctttaaagttcacccttaaggcctttgtttatttaaacatgaactgatggtaactgtacattttgtgctaaaatgcatatttatatgtgcataccatatgtggagatagaaaagaccttta

SEQ ID NO: 177 - DNA, 274 bp, Homo Sapiens
gcagagaagagtttagtgactgaggccgaaaattcacagcaccaacagaaggaagagggtgaggaagccataaactcaggccaacaagaacctcagcaggaggaatcttgtcaaacagcagctgaaggagataattggtgtgaacagaagctgaaagcttctaatggagacactcctacacatgaagacttgaccaaggacaaggagcggacatcagaaagcagaggactttcacgactattctcctcgtttctcaaaaggcccaaatctcagg

SEQ ID NO: 178 - DNA, 372 bp, Homo Sapiens
gatcaggttcgagctcatcgaccctggcgcagacggccttggtcgcagcgccacgaaggtctgggtcgatggcgtcctagcgttcgacggcagcgcgagccccgagagcacgccagcgttctgggcgtcgggtgcaacgttcgaagagagcctggactcgctacacctctgcctcgcccccgcttcgccctttgcgagccaggccgtggtgacggtgcgcgtcgtttcgcggatcaagggcggcggggccgtgctcgacgagacctatcggttcaccgcggaggaccgtacggcgccgaagctcgtcgcgagcgttgcggtgtcgccgcgtgcaatacgactcgcgttcgatgaaccggtgaccgcgccgga

SEQ ID NO: 179 - DNA, 260 bp, Homo Sapiens
gggagcagcttaatcggtccgggcgtattcagggaaggctggtcaagaatcttgagacggaattgcaccgtctcggcgtgatccgccgggtcgcagcccacggcatagaccgccaaacgcgttttgctcaccggtttccacaggaccgacgcattgccggcacaactgagcgcggtggtttcgtcaacgtgggcgggcggaatgcgctgcacctggatgatcgcggacggcgaaagttcctgcgcgaggtcgatcgccac

SEQ ID NO: 180 - DNA, 1592 bp, Homo Sapiens
aagggagcgcacgccggcggcgcggaggccggctctgcgcttcgggccgccccctccccccaccccgctcacactcggcacttacttcggctgtctccgctgccctccagcggagacgcagctcctcaggcgcccggcggtatttgttgggtcggcggcgtcagggattcgcagtggcctgtggtcggcgtcgtccggccactggtgcgcccccgcggcaggcagagctcacgctcctgtcccccggctggtccggggtctgggcgccgcgtcgacggcggccccgcaggacgcgcagaccgggccgcagcccatgccccgagcggactgcattatgaggcacctgccttacttctgccggggtcaagtggtgcggggcttcggccgcggctccaagcagctgggcatccccacagctaattttcctgagcaagtggtagataatcttccagctgatatatccactggtatttactatggttgggccagtgttggaagtggagatgtccataagatggtggtgagcataggatggaacccatattacaagaatacgaagaagtctatggaaacacatatcatgcataccttcaaagaggacttctatggggaaatcctcagtgtggccattgttggctacctgagaccagaaaagaactttgattctttagagtcacttatttcagcaattcaaggtgatattgaagaagctaagaaacgactagagttaccagaacatttgaaaatcaaagaagacaatttcttccaggtttctaaaagcaaaataatgaatggccactgatgaaaaattgtattatttattcattcactgttttctagtgtttctgtgtttattactgttcagcatcatcttggttatatactgaaaatcaaacactttactacagttgtgaattagtttaaaccgtacaatgttgttatcatatcatgcttcaactattaaattaagcccatcatatcatagcactaaaaagattgagttaaaaataagatttaaaaaatatatattgattaaaatgtaccactagaaaggtattacatgtgtataagtatgggtaaaaaggcaagtcactagtttgagacgaaaactaaaattttcatggtaaaatgccagcatgtatgtacttgtgtagtgtgtacttctaaacagagaaggcttataaaagtaaatgcattaaggccaagtgcagtggctcacaccggtaatcccagcactttgggaggccgaggtgggaggattgcttgagctcatgagttcaagaccagcctgggcaacatagcgagactccatctctataaataaaaaaaaaggaaatgcattaaatagaaggttgatagtttatcataaacctgcggggaagaaactcagactttctatttttgatattttgtgcattaatacattacaaacatgaagatgtttgtaaagttttgttttagtcattttctttgcagtcacatcattgtaccaccttcattattgtatagagctgcttcaattctgagtcctctggacttcccctgcctatctgtttgttgttgttgttgaagacagtaaaataagtgttttc

SEQ ID NO: 181 - DNA, 770 bp, Homo Sapiens
accggtccggaattcccgggtcgacccacgcgtccggcgggacggtcaggggagacctccaggcgcagggaaggacggccagggtgacacggaagcatgcgacggctgctgatccctctggccctgtggctgggtgcggtgggcgtgggcgtcgccgagctcacggaagcccagcgccggggcctgcaggtggccctggaggaatttcacaagcacccgcccgtgcagtgggccttccaggagaccagtgtggagagcgccgtggacacgcccttcccagctggaatatttgtgaggctggaatttaagctgcagcagacaagctgccggaagagggactggaagaaacccgagtgcaaagtcaggcccaatgggaggaaacggaaatgcctggcctgcatcaaactgggctctgaggacaaagttctgggccggttggtccactgccccatagagacccaagttctgcgggaggctgaggagcaccaggagacccagtgcctcagggtgcagcgggctggtgaggacccccacagcttctacttccctggacagttcgccttctccaaggccctgccccgcagctaagccagcactgagctgcgtggtgcctccaggaccgctgcgggtggtaaccagtggaagaccccagcccccagggagaggaacccgttctatccccagccatgataataaagctgctctcccaaaaaaaaaaaaaaaaaaaaaaaaaaaaaaaaaaaaaaaaaaaaaaaaaaaaaaaaaaaaaa

SEQ ID NO: 182 - DNA, 439 bp, Homo Sapiens
ttttttttttttttttttttttttttttttaattgagacaggccactttattaaaataggtccaaatgtaacacacgataacattcattttaaataaaaactacaaacatgacttgacttctccaaatatacattctctcaggtagtccatccgagcatcctttgttgacagtgccatagagttccattcaaactgggaaatctgaattacacgataccccagaatttccaaatgtcgttttttcatagcagattttcctttcatgtgagggatatttctacaaagtgcttttgaatccaaaaattccaaagcaatcctttcagcccctggtggcagccttgatccaactatttcgatattggattcccagggcatttctggtagttgtcccaatgctatattatggcttccatacggaagaggtttttttcttttatc

SEQ ID NO: 183 - DNA, 345 bp, Homo Sapiens
  misc_feature (295)..(295): n is a, c, g, or t
gtggatgacacattcatgacccccgaggcacctcaggagtggcctgggaatggccggtagctgggccgtcattcagggcttgcggaaggaccgaacagggagcaggagcttcgccggaacagcgccgtatcttccttggagacctgggtcaaagcccgctgactggcccgggagaaggcctgccctcagggagcccaggccagccttgtcgcatcccttgcggtgggcattgggctctttccctgctggctttgtccgccgggagcccttgagctggagtctgtggctcctcaanctccttgggactctggagctccggccccaggagtgtctgtctgtggtgat

SEQ ID NO: 184 - DNA, 528 bp, Homo Sapiens
ggcggcttccttggagtatgactatgagaccatccgcaacatcgactgctacagcacagatttctgcgtgcgggtgcgcgatggcatgcggtactggaacatgacggtgcagtggtggctggcgcagtatatctacaagagcgcacctgcccgttcctatgtcctgcggagcgcctggaccatgctgctgagcgcctactggcacggcctccacccgggctactacctgagcttcctgaccatcccgctgtgcctggctgccgagggccggctggagtcagccctgcgggggcggctgagcccagggggccagaaggcctgggactgggtgcactggttcctgaagatgcgcgcctatgactacatgtgcatgggcttcgtgctgctctccttggccgacacccttcggtactgggcctccatctacttctgtatccacttcctggccctggcagccctggggctggggctggctttaggtgggggcagccccagccggcggaaggcagcatcccagcccaccagcct

SEQ ID NO: 185 - DNA, 4567 bp, Homo Sapiens
actgctgacacgtgtgcgcgcgcgcggctccactgccgggcgaccgcgggaaaattccaaaaaaactcaaaaagccaatacgaggcaaagccaaattttcaagccacagatcccgggcggtggcttcctttccgccactgcccaaactgctgaagcagctcccgcgaggaccacccgatttaatgtgtgccgaccatttccttcagtgctggacaggctgctgtgaagggacatcaccttttcgctttttccaagatggctcaagattcagtagatctttcttgtgattatcagttttggatgcagaagctttctgtatgggatcaggcttccactttggaaacccagcaagacacctgtcttcacgtggctcagttccaggagttcctaaggaagatgtatgaagccttgaaagagatggattctaatacagtcattgaaagattccccacaattggtcaactgttggcaaaagcttgttggaatccttttattttagcatatgatgaaagccaaaaaattctaatatggtgcttatgttgtctaattaacaaagaaccacagaattctggacaatcaaaacttaactcctggatacagggtgtattatctcatatactttcagcactcagatttgataaagaagttgctcttttcactcaaggtcttgggtatgcacctatagattactatcctggtttgcttaaaaatatggttttatcattagcgtctgaactcagagagaatcatcttaatggatttaacactcaaaggcgaatggctcccgagcgagtggcgtccctgtcacgagtttgtgtcccacttattaccctgacagatgttgaccccctggtggaggctctcctcatctgtcatggacgtgaacctcaggaaatcctccagccagagttctttgaggctgtaaacgaggccattttgctgaagaagatttctctccccatgtcagctgtagtctgcctctggcttcggcaccttcccagccttgaaaaagcaatgctgcatctttttgaaaagctaatctccagtgagagaaattgtctgagaaggatcgaatgctttataaaagattcatcgctgcctcaagcagcctgccaccctgccatattccgggttgttgatgagatgttcaggtgtgcactcctggaaaccgatggggccctggaaatcatagccactattcaggtgtttacgcagtgctttgtagaagctctggagaaagcaagcaagcagctgcggtttgcactcaagacctactttccttacacttctccatctcttgccatggtgctgctgcaagaccctcaagatatccctcggggacactggctccagacactgaagcatatttctgaactgctcagagaagcagttgaagaccagactcatgggtcctgcggaggtccctttgagagctggttcctgttcattcacttcggaggatgggctgagatggtggcagagcaattactgatgtcggcagccgaaccccccacggccctgctgtggctcttggccttctactacggcccccgtgatgggaggcagagagcacagactatggtccaggtgaaggccgtgctgggccacctcctggcaatgtccagaagcagcagcctctcagcccaggacctgcagacggtagcaggacagggcacagacacagacctcagagctcctgcacaacagctgatcaggcaccttctcctcaacttcctgctctgggctcctggaggccacacgatcgcctgggatgtcatcaccctgatggctcacactgctgagataactcacgagatcattggctttcttgaccagaccttgtacagatggaatcgtcttggcattgaaagccctagatcagaaaaactggcccgagagctccttaaagagctgcgaactcaagtctagaaggcacgcaggccgtgtgggtgcccggcgtgagggatcaggctcgccagggccacaggacaggtgatgacctgtggccacgcatttgtggagtaagtgccctcgctgggctgtgagaatgagctgtacacatcttgggacaatctgctagtatctattttacaaaatgcagagccaggtccctcagcccagactcagtcagacatgttcactaatgactcaagtgagcttcggtactcctggtgcccgcccggccagaccgtcagcttgataattactaaagcaaaggcctgggtgggagaacaggtttctagtttttacccaagtcaagctgcacatctattatttaaaaattcaaagtcttagaaccaagaatttggtcatgaaccattaaagaatttagagagaacttagctctttttagactctttttaggagtcagggatctgggataaagccacactgtcttgctgtatggagaaattcttcaaggggagtcagggtccctcaggcttcccttgtgtctccctggacctgcctgacaggccacaggagcagacagcacacccaagcccgggcctccggcacactctttccactctgtatttgctaaatgatgctaactgctaccaaaaggcccttgggacatcagaggagccggcagcgaaggtagaggatgtgttccagaaacattagaaggcaggattaattcagttagttagtctcttgttaaatggaaatgggaattggaaattcctgataaagaattggcctggctgggtgcagtggctcacacctgtgatcccagcactttgggaggccaaggcagggggattacttcagcccaggagttccagactgcctggctaacatggcaataccctatctctactaaaaatacaaaaattatcggggtgcaatggcatgcatctgtaacccagctattcaagaggctgaggcatgaggatctcttgaacccgggaggtgggagttgtagtgagccgagatcatgacactgcactccagcctgggcaacagagcgagaccatctcttaaaaaaaggcattgttagtgtaactcaaggttaacatttatttcatgtcagtacagggtgctttttcctttcagggacattctggaattgtattggttgtacattcttttgtgtctattctgtttgtcaagtgagtcaagacttgcttttgtccattttgatttgtgtgtattagtctgagtcttggctccgttttgaggtatgagcaaagttttgctggatagagttaacctttagggaaattccttattttggtatgtggcaatgctaatagatccactgaagatctggaaaattccaggaactttttcacctgagcctttcttctgagaaatgctgcagtcagaagggtgtgctggtaaagtattttggtggcagctgccatcatggtcattgccttcatataacatgcttcgtgctcatggtcattgccttcatataacatgcttcgtgccatcatgatccttgccttcatataacaaacatgcttcgtcagaggtgttggggttgaaaaaggagctgcatgcttcactggagttgagggcctctcctgtctgactttaagccagaacttgtggctgggccatggaagctgtgactcctctgtggacatggtggcagcagggaacccctagagagaggggccactgggaccaggcctcctgttgtggagggactcctgggacagtcctccaccctgtcctgtggtcctgtgtacagggttggcctcttcctcctcccctgccaggcctctgcccatgccccttccttccttctcctgggactggtgaagctaggcatctggaagacttcttcctagcctggaagccctgacctcggcccatctgcagaatctcccagttccttcacagctgccgagtcctctcacgggtgcggtggaggcggccttgcggtggtgctttctgggcagccaggggttcctgggtgggaggactgtccctctggggacgtggcactgaagtgcctgctggcttcatgtggccctttgccctttcccagcctgagagatgctcaaaggtggggagctgggggagccacccctcggccattccctccacctccaagacaggtggcggccgggcaggcactcttaagcccacctccccctcttgttgccttcgatttcggcaaagcctgggcaggtgccaccgggaaggaatggcatcgagatgctgggcggggacgcggcgtggcgagggggcttgacggcgttggcggggctgggcacaggggcagccgcagggaggcagggatggcaaggcgtgaagccaccctggaaggaactggaccaaggtcttcagaggtgcgacagggtctggaatctgaccttactctagcaggagtttttgtagactctccctgatagtttagtttttgataaagcatgctggtaaaaccactaccctcagagagagccaaaaatacagaagaggcggagagcgcccctccaaccaggctgttattcccctggactccgtgacatctgtggaattttttagctctttaaaatctgtaatttgttgtctattttttcattctaaataaaacttcagtttgcaccta

SEQ ID NO: 186 - DNA, 374 bp, Homo Sapiens
  misc_feature (308)..(308): n is a, c, g, or t
ttttttttggtgtggcagcttgtaggtgatttttattttcttctttgtgtctgattttccaatgttctttgataaacatgttttactctaatacagggcgatacactagtgtgggccgcacaagtcctggcctttgtctgagagggcaaggcaggcgtgaagccaggaaaccccgcgggaaggatggggcttgttttctcccccaaaacacccaaggaccgacatccgcggggaggcgccacgacaccgacgtccgaggggagggcgccatgagtttcgggaagctacaatccacaccacaccaacgnctttttccatcttaaagatacacttcaaacgcaagggctgagcttggggccctgaccgccaggcat

SEQ ID NO: 187 - DNA, 5677 bp, Homo Sapiens
cagaagtcaaatagttaaagcaaattctagatacatggtagagaccaggagaaaatatgaataactttcttctaaacaaggagctcagtggataaaccatacctctagattccttgcttccattttcccagaaacaagatgaggaagagaaagatcagtgtgtgtcaacaaacttgggccttattatgcaagaactttcttaaaaaatggagaatgaaaagagagtccttaatggaatggctgaattcattgctcctactactttgtttgtatatatatcctcatagtcatcaagtaaatgatttttcttcactgcttaccatggacctgggacgggtagatacatttaatgaatccagattttctgttgtatacacacctgtcaccaacacgacccaacagataatgaataaagtagcctctactcccttcctggcaggtaaagaggtcttgggactgccagatgaggaaagtattaaagaattcacagcaaattatcctgaagaaatagtaagagtcacctttactaatacatactcatatcatttgaagttcttgctaggacatggaatgccagcaaagaaggagcacaaggaccatacagctcattgttatgaaacaaatgaagatgtttactgtgaagtttcagtattttggaaggaaggttttgtggctcttcaagctgccattaatgctgctattatagaaatcacaacaaatcactcagtgatggaggagctgatgtcagttactggaaaaaatatgaagatgcattccttcattggtcaatcaggagttataactgatttgtaccttttttcctgcattatttcattttcctcattcatttactatgcatctgttaatgtcacaagagagaggaaaaggatgaaggccttgatgacaatgatgggtcttcgggattcagcgttctggctctcctggggtttgctctatgctggtttcatcttcattatggcccttttcttggcacttgttataagatctacccagtttatcattttgtctggcttcatggtagtcttcagcctctttctcctgtatggattatctttggtagctttggctttcttaatgagcatcttggtaaagaaatctttcctcaccggcctggtcgtgttcctcctcactgtcttttgggggtgtctggggttcacatcactgtacagacaccttcctgcatccttggagtggattttaagcttgcttagtccctttgccttcatgcttggaatggcccagcttttacacttggactatgatttgaattctaatgcatttcctcatccatcggacggctcaaatctcattgtagcaacaaatttcatgttggcatttgacacttgcctctatctggcattggcgatttactttgaaaaaattttgccaaatgaatatggacatcgacgtccacctttgtttttcctgaagtcctcattttggtctcaaacacaaaagactgatcacgtggcccttgaagatgaaatggatgccgatccttcatttcatgactcttttgaacaagcgcctccagaattccaagggaaagaagccatcagaatcagaaatgttacaaaagaatataaaggaaagcctgataaaatagaagccttgaaagatctggtatttgacatttacgaaggccaaatcactgcaatacttggtcacagtggagctggaaagtcaacactgctaaacattcttagtgggttgtctgttcccaccaaaggttcagtcaccatctataacaataagctttcagaaatggctgacctagaaaatctcagcaagctgaccggagtttgtccacaatccaatgtgcaatttgacttcctcactgtaagagaaaacctcagactctttgctaaaataaaagggattctgccacaagaagtggataaagagattttcctgttggatgaaccaactgctggattggatcccttttcaagacaccaagtatggaaccttctgaaagaacgcaaaacagaccgcgtgatcctcttcagtacccagttcatggatgaggccgacatcctggcggacaggaaagtatttctctcccaagggaagctaaagtgcgcgggctcttctttgtttctaaagaagaaatgggggattggatatcacttaagcttgcagttaaatgaaatatgtgttgaggaaaacataacatcacttgttaaacagcacatccctgatgccaaattatcagccaaaagcgaaggaaaacttatttatacattacccttagaaagaacaaataaatttccagaactttacaaggatcttgatagctatcctgacctaggaattgagaattatggtgtttccatgacaactttgaatgaagtattcctgaagctagaaggaaaatctacaattaatgaatcggacattgctattttgggagaagtacaagcggaaaaagctgacgacactgaaaggcttgttgagatggaacaagtcctctcttcacttaacaagatgagaaagacaataggtggtgtggctctctggcgacagcaaatctgcgcaattgcaagggttcgcttgttaaagttaaagcatgaaagaaaagctcttttagcactgctattaattctaatggctggattttgccctcttcttgtggagtataccatggtgaaaatatatcaaaacagttacacctgggaactttctcctcatttgtatttccttgctcctggacaacaaccacatgaccctctcactcaactactgatcatcaataaaacaggggcaagcattgatgactttatacagtctgtggagcaccagaacatagctttagaagtggatgcatttggaactagaaatggcacagatgacccatcttataatggagccatcacagtgtgttgtaatgaaaagaattacagcttttcgttagcatgcaatgccaaaagattgaattgcttcccagttcttatggacattgttagtaatgggctacttggaatggttaaaccatcagtacatatccgaactgaaagaagtacatttttggagaatggacaggacaatccaatcggattcctggcatatatcatgttctggctggttttaacatcgagttgcccaccttacattgccatgagcagcatcgatgattataagaacagagctcggtcccagctacggatttccggactctccccttctgcttactggtttgggcaggcgctggtggatgtttccctgtacttcttggtcttcgtttttatatatttaatgagctacatttcaaacttcgaagacatgctacttacaataattcatattattcaaatcccatgtgctgttggttattccttttccctcatcttcatgacatacgtgatttccttcatctttcgcaaggggagaaaaaatagtggcatttggtcattttgtttctatgttgtcactgtattctctgtggctggatttgcgttcagtatcttcgaaagtgatattccatttatcttcacttttttaataccacctgccacaatgattggctgtttgttcttatcttctcatcttctcttttcttctctcttttctgaagaacgaatggatgtacagccatttctggtattcctaattcctttccttcattttatcatttttctttttactcttcgatgtctggaatggaagtttggaaagaaatcaatgagaaaggatcctttctttagaatttctccaagaagtagtgatgtgtgtcaaaatccagaagaaccagaaggagaggatgaagatgttcagatggaaagagtgagaacagcaaatgccttgaattctactaattttgatgagaagccagtcatcattgccagctgtctacgcaaggagtatgcagggaagaggaaaggctgtttttccaagaggaagaataagatagccacgagaaatgtctccttctgtgttagaaaaggtgaagttttaggattattaggacacaatggagctggtaaaagcacatccattaaggtgataactggagacacaaaaccaactgctggacaagtgctactgaaagggagcggtggaggggatgccctggagttcctggggtactgccctcaggagaacgcgctgtggcccaacctgacagtgaggcagcacctggaggtgtacgccgccgtgaaagggctgaggaaaggggatgctgaggttgccatcacacggttagtggatgcgctcaagctgcaggaccagctgaagtctccggtgaagaccttgtcagagggaataaagagaaagctgtgctttgtcctgagcatactggggaacccgtcagtggtgcttctggatgagccgtcgaccgggatggaccccgaggggcagcagcaaatgtggcaggccatccgggccacctttagaaacacggaaaggggtgccctcctaaccacccactacatggcagaggctgaggccgtgtgtgaccgagtggccatcatggtatctgggaggttgagatgtatcggttccatccaacacctgaaaagcaaatttggcaaagattacctgctggagatgaaggtgaagaacctggcacaagtggagcccctccatgcagagatcctgaggcttttcccccaggctgctcggcaggaaaggtactcctctctgatggtttataagttgccagtggaagatgtgcaacctttagcccaagctttcttcaaattagagaaggttaaacagagctttgacctagaggagtacagcctctcacagtctaccctggagcaggttttcctggagctctccaaggagcaggagctgggtgattttgaggaggattttgatccctcagtgaagtggaagctcctcccccaggaagagccttaaaaccccaaattctgtgttcctgtttaaacccgtggttttttttaaatacatttatttttatagcagcaatgttctatttttagaaactatattataagtacagaaatggttctccgtgtggtgggaggaggaggttcgggtgctgggtaagtgccatgtcagtgtggacagaggcatttgactaagccaacctcctctcacagcctctgtatctctgcaggccatactggttccattgttctgtataatactgaataaataaatttacttttacatgatcgtataagtttctagataagataaacaaattctgtttaaatttttttaataaaaatcttaaaacactttttttctaacctagactgagaaattcatgtttacttttctaggtgtatgatactttgtaaagttgatactttcctaagaatttaacatgtcatatttttgaaatagatttaagtgtgcttcttattgctaaaaatactaaatgtcatgggtcatagtatctgatatcaatatcgttgataacatatccacaggtaacaccatgatgtaggcataaatggaaaacaaaaaccctactatttcaaatatattgtacttttttatttctgtaagccaactgtgtgccattttcactggacttttaaatctagactttagtgatgtctacattgtaaatgatcttttgtggatatttgtcacttggtttcagaaagttcacaaatgtagcaacagctcacatgactgagtaggtagaaaatgtgaaataaatctcatatatatagttttg

SEQ ID NO: 188 - DNA, 542 bp, Homo Sapiens
  misc_feature (259)..(259): n is a, c, g, or t
atggaacactgagacaccgacggaatgctccgaatcgcccccgccgcccaccctgtacgtgcagctccacggagagaccacccggcgcttggaggcggaggagaagccattgcagatccaaaatgactacctcttccaactgggatttggggagctgtggagggtgcaggaggaaggcatggactcggagattggctgcctcatccgcttctatgcaggaaaacctcacagcacgggtagctctgaacggattcagctntcaggaatgtataatgtccgtaaaggcaagatgcagttgccagtgaaccgatggacaagacgccaagtcatcctatgtgggacctgcctgatagtatcatctgtgaaagacagcttgaccggaaagatgcatgttctgccactaattggtggaaaagtagaagaagtgaaaaagcaccaacactgtttagcatttagctcctctggaccccaaagccagacttactacatttgctttgatactttcacagaatacttaaggtggctgcgacaagtctccaagg

SEQ ID NO: 189 - DNA, 725 bp, Homo Sapiens
tttttttttttttttttttttttaatttaaaggtttagtttatacaattgataattctgcaaaccacaatatgtcaataactacatactgtaataaaaataaacaaagtcatacttaattctataatgcattaagaataacctaaaaaaacaaattgtgaataaaggcatatttaataaattagggaacatcttaacttctaatagactgggggaaatttttaagttttctatgtacacaaaggcagtgggaacaaatgaaaaaaacaaattactacattgttgcagcacattaaagactggatggtgtatattattcacaattacatcctctttcccatagcctggcagaggaaagtagttaccaagcacaggaacaatttcaacatctcactggagtctccaaaagcaagcagatactgcaggatgtcattaagcaacttactgtcacttcacaccatatgtggcagtaagaaacttaaaaaaaaaattaaaaggcacgcataagctgatttcaaatattttaagtccaggctactctctttagatacaatgttttgaacacttgtatagaacagtttttaaataaacatttccaaaaacttgaatacagaacttaggaaccatgaatcttcaccaaaaaaagttacattgaaaaaaaaaaaaattcatgaaataattacagctaacctatatttagagataaaatattttttggcacctata

SEQ ID NO: 190 - DNA, 583 bp, Homo Sapiens
ttacaaagaatcaactttattgaacattcagggtcagtttctcttcttgctcttgcctgtgaccttggctggtgtgaggactggagctgctgcctggtacagggtggaggagatcttgttgatgtagtacagaccaaccatggagaagatgaagcaggtggtgacacagactcggtggatgaggccagatgcaaagagagccaacaggaggcacaggagaatctcagggaagatctttgcttgggatcccttgccaaagacaagattctccagatttttgtaggcagttagcgagaacacgcagagagccggatcccaaaaggggcccccctggatggtgggccccccgctggaggcccaattaagggtgtaacaactggcatccccgcaaagagcagcccggacaggaggggggagagcgccacgggttgcccgtacccaccaccatcatggcccccccgtgagttcaaacggggcctctggcaagaaaggcgcctcttgccgaattttgggcctcagggccaatttccctaagtgggtcgtataaattcggaatcatgtctaatcgtttcccgggtgaaat

SEQ ID NO: 191 - DNA, 574 bp, Homo Sapiens
  misc_feature (2)..(2): n is a, c, g, or t
  misc_feature (16)..(16): n is a, c, g, or t
  misc_feature (18)..(18): n is a, c, g, or t
  misc_feature (20)..(20): n is a, c, g, or t
  misc_feature (22)..(22): n is a, c, g, or t
  misc_feature (226)..(226): n is a, c, g, or t
  misc_feature (555)..(555): n is a, c, g, or t
  misc_feature (573)..(573): n is a, c, g, or t
tngcggctgcaacggnangnanatgctcgggccggcagggtttccccgcacgctggcgcccacatcccggcgcggaggccatgtaagtttcgctttccattcagtggaaaacgaaagctgggcggggtgccacgagcgcggggccagaccaaggcgggcccggagcggaacttcggtcccagctcggtccccggctcagtcccgacgtggaactcagcagcggagnctggacgcttgcatggcgcttgagagattccatcgtgcctggctcacataagcgcttcctggaagtgaagtcgtgctgtcctgaacgcgggccaggcagctgcggcctgggggttttggagtgatcacgaatgagcaaggcgtttgggctcctgaggcaaatctgtcagtccatcctggctgagtcctcgcagtccccggcagatcttgaagaaaagaaggaagaagacagcaacatgaagagagagcagcccagagagcgtcccagggcctggactaccctcatggccttggttggtttacacaaatttgacagacctgctgccttantccttgattcaggtgttng

SEQ ID NO: 192 - DNA, 7883 bp, Homo Sapiens
ttcaagtatggcagacaaaggatgttctgcgtggggaaatgtggtgacacccatttcacaaggacagctcacatagattgagtgctcaggaaggaccagcaccatacccagtgcctgatgtgtatcatctcaattagtccttgcctcagatgcaaaaggaaaccatcgccatcatcatcaccaccatcatcatcttcctcctgtgcagatggaaaggctgaggcatagagaggtgacggagtctgcccaggactgcaagcctgctggtggcagagccaggttccaatggaatgaaggctgtcatcctcagatggcagggtaggcaggtggctagagctcacttgggagaaggggaaaggacactgactttggctagggatggagcagagcttgggctggctttccatgcacgggcagggggcgtggctcatggctacgctccagccccgggtgtggacatttaatcttccaggtctaccctaggctatgggtctggacagcactgtgatggaaagaagacactctatgtcctgcattctgtgaccaatgatgtgactgtgggaatggcgctggcatctggctgccactctgggacgggtggccagctgccatcaggccccacccaggatgggaccaccatgcgacttcttccctcgctcctcctggtcatgtccagagccccaggaggaccagcaaagcctctcgagccgatggcagctcacgttctgccttgtcagctactcctctcctgggcaatattggctgcttgctgtggctctccccggggtatgtgactgcctctgtgctgggcacctggcctgggctttccttctgggcctgggcagctgggctcagcttggacccaggcagcagccacagaggggcccatggaggtgacagagttgcttctatgatggtgaacgggcagctgtgacacggaggaggcgaccactcctgagtttccaagtgctgcggtcagggccggggccagcaaagtccctcccatattcaaagagcgggtttgggtttgtcccaggaggacatagtcaggagcccatgctgggacatgcctcctccaaagttcagcctggatccccagcctctgccaacggccccgctccttagctaacccagcttgctcctgggttccacggcggagtcagatgtttctgggcagtttcacctttgtgccttaaatgcatgttgaggactttaaggaattgtggagaaatagggctgtggcaaaggcaagtgacaactgggaacaatgatcccgcagaggctgctgaggcctgggccccaggggcgtgggttcatccttctgcctgggctttggtgggaggggcagactctgtggtctgagacacaaaaaaacccaaaacatatgtgtgtacagacacacagcagagccacacacacacttgtgcccatgcacacactcacaggaggcccgtggactccgcacagggaagaaactcctccggtcgacagtggacggcgctgcagcagggactcacccccaagccctgcctgcctcccattgcccacctggccctggcttgatgggcttatctcatgctgtggccggggacctcttgcttcctgcaaccccttgctggactggggcctgggcctctcctgggctgtgcctagggtttgtaacccagggcctgtgccggcgtgcacagagcatctctccctgggaggctcagggctgcctcctcgagctctgtgggcctgcactggccggtgagcttgtggtgtgggttttcaggctgtatccttctacctcctgagcccaggggtcccaggcgccctgcagctgtctcctcggccatcctgtggggccccgaggccttgccctcacttcagtgcctgggtgctcaggctttgcccaggtgccaggagaaggtgtgagcatgagcctattggacacacctggcgacgtataccaggtgtcccacccctgccaccatggggcctcccgatacggcaaccaccacggacctgtggggaccaatgaggaaagagagaggcaggtctgggccaggctcacagggactccggcatagcagaccctgccccagcaggcccccttgtccttcctgggtcctggtccttcatgaggaactagcccatccctggtggggctcccaccccgcttctcagtgggctctatgcttgcctcgtcggagtcacccctcaggcagtcctgggatcctctcctttagacccactgtgccttcccggcctcccgggcttctgctgggggcagaagaaatgcctccccaggtctgtctctggaggctctgagggagatgggcttgggggctgtaggaggaggcagggattccagggtgtcaggaaggcaggggtgccaggtcccacctagtgaagtaataaaccgtgggtggtgatagtgacccagtgccctcactgcccagccccgcctgtcctcagccagcactgcagggatcccaggcccagactctggaggccttcactgatcccagccaccccagaaaagctgcagcctgcaggcaccagccgggccatatgcccagtgccagctagggcccaccgcccatcctgcacacggggccgctgggcaggtgcccctcacacccccaggatgtcagtgctcacctcgagcaaagcgccccagctcggccttgggaggtggtcatgtccagggggatgatggagagctgtccaaccaagagagcgggagggagggaaggagggagggagagagatagagagagagagagagagagaggaagtgtgggccctaaggctgccttagtggaggtgcgcgtggcctgcacctcaccaagcctagccactctcgcggctctgagtggctcacaggcttgtgagggccccgtcgctgcctgctgggtccccaccagggctccctctaggaatgcgccatggctgctatgacaatttgcacagcccagtggcttaaacaccatttataccacaggtccagatgaatcctgcagggccagggtctgggggtgctggaggccatgctccctccaggcttgcggggagaacttccctgcctcctccagtctctccatccctgagctctcggctcctcctccgtcttcagggccagggcgtagcgtctgctctctcggcctctgcctccgcttcccacctcacctggcttctgtctatgtcagtctccctctgccaacctcctagaaggacacttgtgattacattagggctcacccctttaatccaggggagcctctccacttcatgattttcagctaacttgcttctgcacagaccccctttccctataagggcacacattcactggtcccggggctaaggaccttgctccaagtccctccacccatgatgctgtgccttccagaaacctgtcctctgcagctcggtcttgaccccaagcctgctggtgacctgaacttcacagggttatccccttggactgtgtgcagcacgatgcaatttctgggcctgaatgtcatgctccctggggcaggaccttgagcctgcagcacacactaggccacctgcagtctcacaggccatgccctgggtagacagggaggtgctcaaccccagctcgggtcctctagtctgcctggctaccatgcttctcactctcctgcatctgcagaccctgcgttgccatgtgaggcaggggtggggtggggctgagggcgtggctttggtccctggctgtccggatgaagtaccagagtgacgccacagcccatcccggtgacatgctcacccccaacccccgtgtccgggaccccggtcttgtgtggtccctgatgtggagtcctcagtccttaagatacatccagaaagtcctggccatgaattggaggtgcagagtcctgcagagcctctgggctgggctggtgcccccaggagatggagggcctggtggatgccctcctccctcagagctggggcagctgcctcccaggggtgggactctgggctcagagagaggcccttgagctgcagctcagggggatgcgaggcttcgtggactgtgtcctggtccatgtggtgcacgtgtctccacctccaaggagaggctcctcagtgtgcacctcccccacatccgtcctctctgccggccccgggcgtctgagcagtcattccatgccagcacctctgcagcctgctgggcctcaggttctctgtgagggacctccccggccttcggcggaggtggagtaagctccgtcaaggcaggtggcttcgtcccttcctgtgagtgacaccagtgatgaaatggacccctccacacaggcatcctcagggcacagggccctgggggcaccttcctcctttcgtatttgttgagaaaaaaagtggcattgcgctcacaccaggatgctggagcagagctgacatgctcgggaaagggcagaggtcactgggggtgggaaggtcatccagtccagactcagcacctcgtgggctggtaaactgaggctcaaagtgctggtgccaggcctgaggcctcgcggtgacccctctctctggttcccagcacctgcctgagacctgccccaggcacccataacctggaattccctgtttccttgtccagggcctgaggaaatggctccccaggtctgtctctggatgctctgaggcagatgggcttgggggctctaggaagaggcagggactccagggtgtcaggaaggcaggggtgccgggtcccacccagtggagtaacaaactgtgggtggcgtttgggcctccccgccttccccactgggtgtgctggtgctggcgctgctgggtcagggctgcccgtgaccccagacaccactgtccatcctgtgaggctcccgtctgggcatgtcctgggtggattcctcctttctgttaagtagctacatgaggcaggggctcctggatccaaagcaaatgacaggaattccagagccaggtgcatccactcagggcagccagtgttggtggagctgcctctagcacatggaggagagtgaaagtcagcctgcccctctcacgagaaaagaacctggggatacctctcagcctccagcgttgcaagtgcaaggccagtggagttaatctgcaacgtgcacgagggcgtgtgtcagtggctgtgtgcaggagtgtgagtgagcaagagcaagagcgcatggctcctgctgtacctcaaggtgtgggctcctggtggctgctcagtgttcccaggggtgagaggcctcatgtatcctaggctgcctgagatttctgtgtgctgatcgcatcctcagtttcttgtccaccgcttcactggcaagagtcccaggctccaaggacaccctccctgcacatgattgggtgttaatggtggcctgggttgtgtcttcccctggggatgagggttgggtgtccatggtgccctgggctgtgtcctcccctagggatgagggtcgggcctccacgatgccctgggctgtgtgctcttatgggaatgagggttgggtgtccaagatgccctgggctgtgtccttccctggggatgagggttggatgtccaagatgccctgggctgtgtactcccctaggaatgagggctgggtgtccaagataccctgggctgtgtcctcccctggggatgagggttgggtgtccatggtgccctgggctgtgtcctcccctggggatgacggttgggtgtccatggtgccctgggctgtgtttccttggggatgagggttgggtgctatggcatcctgggcaggtgcttcctttctgcacaagggttgggtgaccatgatgtcctggcaatggcttccctgggttgcctcttttctgccatgtgggaagagcaggggaggtttagttggtctcagcacatcattctctcaggataagtagaagagtgtctgagctgtgaggccagtgctccagctttggaattgtcttccccaccctcacctccatcccatcaaagcccgacatgtcgtgtggcagcagcgaggtgggtgttggctgttctcttgggctgggggttagtcgtggacggggaaaggagagatgctggtcaaagggcatgaagtttctgctgatgggaggagtcagttcttttgatctgttgcacagcatggtgactatagttaacaataatgactatttcaaaattgctaaaagatgagattttaaatgttctcaccacaaaatgataagtgtgtgaggtgatggatatgccacttaccttgttttaatcatcccacaatatagacaggcattgtcactttgcattgtaccccaggaatcttcacatttgcttttttgtcaattaaaaatagagacacaaaaggagagaggggagagcaatagactcttcacggaaccgtgggcttctgcctccgggtaaaataaactgcaaaaaggattcccaggaaaccgttccctctttcagcccttggttacaggaagccggatttgggaaatctgcctggatgacattcacatgaacgggcacatacaggaaaacacggtaatgtaattagaatagtcagagaaaagtagccagaaatgacattcacatgaacgggcacatacaggagaaaacacggtaacgtaattagaatagtcagagaaaagtagccagaaatgacattcacatgaacgggcacatataggagaaaccatggtaacgtaattagaatagtcagagaaaagtagccagaaatgacattcacatgaacgggcacatacaggaaaacacggtaatgtaattagaatagtcagagaaaagtagccagaaatgacattcacatgaacgggcacatacaggagaaaacacggtaacgtaattagaatagtcagagaaaagtagccagaaatgacattcacatgaacgggcacatacaggagaaaacacggtaacgtaattagaatagtcagagaaaagtagccagaagaatttgcaacgtgcccttgtaacaccaaatttgatcagttttttaaaaaatgatcgttatgtaggtgattgagaagtaaatgtattcttttttaaggtaaaaatttggacccttatcatgcatacccccctctgtgctcttcaaatcaacatcattattaatatctgtacatttttgctcatctgagccagcacaggctgaggctgtcagaatggacaccttttggttgttgggtttctgtcagtttctggggtgaagctgcgtgattgagaacgtagctcttggctgccatctcggggattattaaggactgtgaactctatccacaagccatggcaatatctgtcccaccgaatgctccctctaacacactcttactcccgtgatgtgtgttaagggctccgatgatgctgaaaacagcacaggatgtgaaaaggcaggaacagttctgaagtcaaaggctgatgtcctgtttctctttccctctgtgaccgactcccttcccagtggtaacaagtacccacagcttggtttgaatttctgcacgctgttgtctgtgcactcgctcacacttacgcacacagcaggcatgtgggcgatgctgggtattttgtgtatgagtgggatgcacatacacacatctacatccatatcatgcccatgcatctgtaacttgcttttcccgtgtaagaacacttcttagagtttgttcaatgcatgtgtctgtgtgaatgattgaaggcatttctaacccattttaaagatggctacttaggaccatatggatgttgtactgatgtcatttgaccacgtccattgtttccatcttttgggctgttcttgtgtattttactttccatgtaacactgtgacattgagaattggtacctacaacagtctatttgctttacattaaatttgtaggct

SEQ ID NO: 193 - DNA, 202 bp, Homo Sapiens
caagctcatgatgaactttatcactagttatgccaccttaactagtcagatttcctagaattaggaaatggtgactcttgtctaaatttggttaagtgatgaatttgggttaccttctcatgtgaacctggagattcaccagtcttaacttttgggtcattgtgttttctctacattcatgcattggatgttttgctaaata

SEQ ID NO: 194 - DNA, 604 bp, Homo Sapiens
  misc_feature (16)..(16): n is a, c, g, or t
  misc_feature (82)..(82): n is a, c, g, or t
  misc_feature (85)..(85): n is a, c, g, or t
  misc_feature (223)..(223): n is a, c, g, or t
  misc_feature (469)..(469): n is a, c, g, or t
  misc_feature (488)..(488): n is a, c, g, or t
  misc_feature (527)..(527): n is a, c, g, or t
  misc_feature (547)..(547): n is a, c, g, or t
  misc_feature (554)..(554): n is a, c, g, or t
  misc_feature (600)..(600): n is a, c, g, or t
tggagcctggcgcgangtgggggcgtgcgacggttactctggttactggggccgcgcgcctggcgagacgccagcccgcgangantgctggtgaggaagccgtcgggagccgccgccgccatctgagggaggtaccctggaaaccaccttttatcggtggggaagtgcagtcgcggtgggcggctctgggggccagcgaaacgggaggcctctaaatctttanggttggggctgcattgcctggaagccgcactcttgagtccgaggccatcttttgttggagaaggcgtcggcgttggcgttttcccgaggttgggctgtacagtgtctccgtccgcggaaaaagaagcctcttgaacccgcgccggccccgcagcccccgtgccttccggccgctgctcgccgtcgccagaggtaaggccaacgttttcccccagttgccgaggtgtttctgtgaaccttccttcantcccaattccttcttaaanggcactgctctttgtgagaaaagaattttagacaagaancatatcagaagatatcatanccgcagnaacgtcaggaaacatcaaaagaaaaaaggatatttgatttctggcnagag

SEQ ID NO: 195 - DNA, 597 bp, Homo Sapiens
gatgcccagtccccacgacacctcccacttcccactgtggcctgggtgggctcaggggctgcccttgacctggcctagagccctcccccagctggtggtggagctggcactctctgggagggagggggctgggagggaatgagtgggaatggcaagaggccagggtttggtgggatcaggttgaggcaggtttggtttccttaaaatgccaagttgggggccagtggggcccacatataaatcctcaccctgggagcctggctgccttgctctccttcctgggtctgtctctgccacctggtctgccacagatccatgatgtgcagttctctggagcaggcgctggctgtgctggtcactaccttccacaagtactcctgccaagagggcgacaagttcaagctgagtaagggggaaatgaaggaacttctgcacaaggagctgcccagcttgtgggggagaaagtggatgaggaggggctgaagaagctgatgggcagcctggatgagaacagtgaccagcaggtggacttccaggagtatgctgttttcctggcactcatcactgtcatgtgcaatgacttcttccagggctgca

SEQ ID NO: 196 - DNA, 450 bp, Homo Sapiens
gcggccgcggggcgctgcggggctctgtccggcgctccgcccggcgctgggaactcgagtccccgccgcttcccagctgcttttgtatttcgctgtgagaccctccggtgggcgcgattcacaggcgcccggaccacgtgggagccagggggatccccctccccctcctccgcctccgctccccgccccccgctcccccgcccccttcctctcctcttccacttaaagcggcgatggctccttccgagagggagaggcggccccacactcggtccgggacttgggggcctggaggaagccggactggctgcgcccgcgccggggcgtaggagggggtggcgcagagccggagtctggggcctggcgggagggacgcgccctgggcccttgcgggggtgtcttggtcgccgggtccctttgcctaggcagcgcgggtctcctgcaaacttc

SEQ ID NO: 197 - DNA, 1479 bp, Homo Sapiens
gcgaggcgcggggaaggcgcacctggggtggccctggcgtgcgggcggcgacatggaggacggcgtgctcaaggagggcttcctggtcaagaggggccacattgtccacaactggaaggcgcgatggttcatccttcggcagaacacgctggtgtactacaagcttgaggggggtcggagagtgacccctcccaagggccggatcctcctggatggctgcaccatcacctgcccctgcctggagtatgaaaaccgaccgctcctcattaagctgaagactcaaacatccacggagtacttcctggaggcctgttctcgagaggagcgggatgcctgggcctttgagatcaccggggctattcatgcagggcagccggggaaggtccagcagctgcacagcctgagaaactccttcaagctgcccccgcacatcagcctgcatcgcattgtggacaagatgcacgatagcaacaccggaatccgttcaagccccaacatggagcagggaagcacctataaaaagaccttcctcggctcctccctggtggactggctcatctccaacagcttcacggccagccgtctggaggcggtgaccctggcctccatgctcatggaggagaacttcctcaggcctgtgggtgtccgaagcatgggagccattcgctctggggatctggccgagcagttcctggatgactccacagccctgtacacttttgctgagagctacaaaaagaagataagccccaaggaagaaattagcctgagcactgtggagttaagtggcacggtggtgaaacaaggctacctggccaagcagggacacaagaggaaaaactggaaggtgcgtcgctttgttctaaggaaggatccagctttcctgcattactatgacccttccaaagaagagaacaggccagtgggtgggttttctcttcgtggttcactcgtgtctgctctggaagataatggcgttcccactggggttaaagggaatgtccagggaaacctcttcaaagtgattactaaggatgacacacactattacattcaggccagcagcaaggctgagcgagccgagtggattgaagctatcaaaaagctaacatgacaaggacctgagggaaccaggattcctccctcctaccagatgacacagacaagagttcctggagaatgggagtgttaagacttttgacttctttgtaagttttgtactgctttggagagtgaatgctgccaagagttcctcagattacaaacagcagtggtgccatttccttccccatcttcatgttacaaacctggaaaggctagaacagccattaggcgtcagcatcttgacttttccccagcatcacaaacagccatttcctcgggcaccaaagtaggttccctttgttggaacaattacactggccatgccataatgttgaataaaactctcttcttatgagaaaaaaaaaaaaaaaaaaa

SEQ ID NO: 198 - DNA, 152037 bp, Homo Sapiens
gatcagccttttagtaaccatcaacttgggttctgaaacgctaaataaaggtagggacaaacgggcccacagagcaagcactcaagattttatattcataaatatatactctgtttttctctcctctttctagctgtctgttccaaatcaatgtcaagactagggaagaatatgaagactagaaaattcccttctcaggtaggcatggtgactcatgcctgtaatcccagcactttgggaggctgaggtgggcagatcacttgaggccaggagttagaggccagcctggccaacatggcaaaaccccatctctaccaaaaatacagaaaaattagccaggcatgatgatgcattcctgtaatcccagctactcgggaggctgaggtatgagaatcacttgaacccgggaggtggaggttgcaatgagccgagattgcaccactgtcctccagcttgggcaacagagtgagactctgtctgaaaaaaaagaaaaaaaaaaattccttctcctgctgccaacttttaatgggtggccagaagcgaagaggttgggaattcttggcacttaggccagagggagaaaagtaagatgctgttgccctttgtgccaaagttggtccctaatgtcaccatcagccagcacttccttacctcttgaagattgcctctaccacctcttggcctatgacctgactcctgaccatttttggctccccatcttgggtggctgcactatcgcatgggcattctctgtccctttccttgcctcagccctgcagccaaaccttccaatgtcaccacagtctgatctgggatgttccaatgagaagttcccataatcatgtttctctctttaatgtaaaagggccttctagtctgtgtggcgtatgagatgtaaaactggagtatagaatctgggagggtaaggactgatctccgttgttcaccagcacagagtagaacttcaatgaatgaacaagtaaagatttcccaagtaacctgccacataaatccaggaaagttttgatgctatatgattggcctaacaacttgttcaaatgaagctttctccaagtgtctgctgggtgctagggagctatattggtaaataaagctctgccctcaaggaactctcagtctatgaagttacagtgaataagcaaactgccataatagaagaacatacgagagctgtagaagagcacagaaaagaaaataagtaatactacctggagaagtcaagaaaaacttcagcaaggagagggtatctcaagtgagtcctgaaaaataaacaggaaattgccaagtagacaaggcttgtgaaatgaacactcttgacaatgtgagcgagtgacaggataactgcatacaaaccctgtgtatccaatcaggaggatttaatgacaaaggactctccagaagccctctctgcatcattaattaaagccctgatcacactgcgatatgattatctgctgatggccctcctccggacagccccacctgtcactgcccctggaaagctcaccccaatctggatgcggtctcaagccctcaagccaaagcagggcttcccaggtacagtttccaggctctaccagggtcttggctcagagaagacatagcactgccctcatgtgaaaagttaatgaagaaggaaggatggaagccagatattctttatattatttcaataacttacataggggtagcatgctgattacaagtacagtcccacactgcataatgatgtttcagttgacaacagaccacgtatacaatggtggtcccatgagatcacaccatatttttactgtaccttttctatgtttaggtacacaaatatttacgattgggttacatctgcctgctgtattcagtatagcaacatgccacacaggtttgtagcctaggagcaataggctatcccacataagtgtgttgtaagctataccatctaggtttgtttaagtatattctatgatattggcacaatgatgaaactgcctaatgacgcatgtctcagaatgcatcccatcattaagcaatgcatgactgtaactggaagctcccctatgatcctgaggttccagggagagaaggggttctccctggaatgtgttctaagctaagccttccaatgctctcctgggaatgcgctctaggctaagttttccaatacacagatttacatggggaaggtaggttactggtgagattagaagcctttatttttcagtgaaagctgggagtccagagatgacagtagaaggcacagccagctcgtaaatcagcagcattcagggctctggacagcctctctatcagcaaagcaattgatgcttctgccagggaggctgcaaagaagctgttcatcactacctcatttggagacttgacacccaaatggaggctctaacagccaagttcatagatctgagcaaagcgcagaggcgtcaaatctgtgtacaccagtctgctaagtcttcaagggccctgaggggcaggctcttctcagatgctgctctgactctctgaaggcctttacaaccaaaatgaaatgaaataacttaagtcctagctcaggggcaggttgagagagaccctcaacatggcgatgtcaggtactttgggccaaaagagagacccaggaaactgttgccattgtgttctctacctctgtccctctccagctgggctcgaattgtctcgttctcagtgatgtgagtccacatcgtcttatcatggttcccctgtacagcctaggtcttcatcttcccaaaagccatgggaagcagactactttttccagaacagctaactgactgtgctcaacctttatgacccagttcaaacaagagcccctctctgaagcttccctccaggccaactccaactgagtccctcccttcttggccccataatgctaaactgacaacttggctatggcatttaaagctttaatagttcctatatggattgacaacagtatatgcaaatacttcaaatatatacgtatcacaagtttgtgcttgtgactgagaatctaaaatggcctccagtgatccctgcctgtctccaggcattcatgcccttgtgtaattgcctcccctagaaggtaggcaagacctgtgacttgcttctagtcaatagaagatggtaaaggtgatgaccatctctcctatgtttacattatataggacagcaacttccatctcactatcagactcgattgcctctctctccctttatggctttgatgaagtgagtgatcatacagagaggcccacgtggcaagcaactgagggtggtctccaaatgaccgtcagcaagaaggccctcattctacgaagccacaggaattgaatcctgccaacaaccttgtgagttgggaggcagatcttttcccagtctagacttcaggtgagacaccagccctggccaatgttttgactgcagccttgagagagaatctgaagtagaggagcaagctaagctatccccacagtcctgccccacagaaactgtgagaatgtgtattgtggtaataccactgggcagcaatagataattaatacagcacgcaaactctcagctgataagacatgcaatcaaaggagtgtggagactgctactaaacacctctagacccgcagaggaaggctccatcaaacagccaaaggctagcagtgagaacctgcacgttttagtggtaaaaagaacatttgtctaaaaaatgggaaagtgaaaaacctcaaaaattggcttcccaagacttagatatgagtcccagctctgcctctaagaggtaggtgatcttagtcagcccagatttactcagcccagccttctcatctatacatacaatgtggtcaagagggccagtaagagtggccaatgagagaataaactaggaaatgttttgtcaggccgggcgcgatggctcacacctataatcccagcactgtgggaggccaaggtgggtggctcacaaggtcaggagttcgagaccagcctggccaacatagtgaaaccctatctctattaaaaatacaaaacattagccaggtgtggtgacgggcacctgtaatctcagctacttgggaggctgaggcaggagaatctcttgaacccgggaggcagaggttgcagtgggccaagattgcgccactgcactccagcctgggcgacagagtgagactccacctcaaaaaaaaaaaaaaaaaaaagtgttttgtcaaatggaatgtgatagacacatgttagtttgccccagaactctggggtggccttgggtaaggcactgtcctctctcggtctcagcttccttattgtaaaatgaggagggaagcccatgctatttaatgtctccaagggctctgatcttctttgattctaacatcgcatacccatgagaagagaggaagaggcgaaagtggtagactatgacattttacaatagttcccagtcattctactggccagggtgactgtcttaccattaaggaactggaaagcatttgaccagtcatatctagtcaacctacagggcctacaacctggattcctcaactaagagggaaaatccccatttgttttacaaaaaggaaaaaatgatcaaggtaaagtcagtgggagccaccaaacataaactactgacgcactctgagagtggcagtagctttgattttattgctgagcaccttaactatgtgccaggagcttttataaaaataatctccaaccttcactacaatcttatatagtttgtgtcattcttattgtaaagacaagttagctgaagctcaaagagagtaagccccttacccaaggcacattgctagtacatggtagggctgggatttatcattattattattagagacaggttctctctctatcatccaggctagaatgcagtggcacaatcacagctcactttaacctccatctcccaggctcaagtgatcctccaaccccagcctcccaactagttgggactacaggagcatgccaccatgccaagctaattttttgtattgtttgtagaaacggggttttgccgcattgcccaggttggtctcaaactcttgagctcaagtgatctgcctgccttggcctcccagagtgctgggattacaggtgtgagccaccatagctgacctgggatttaattgtaattttatttaattctaagcccctggtttttgcacacatctcatgcctctgggagagagcagcttggacagaaaggacagtctgtgattacacagcaaagtaaaggttcttgtcctgcagcaagatcatgtgcagagtgtggcttcatttattcatgccacaaatatttactgagtgccctatgtatactaggttatgtggtaggcaatgaagatatagagtaacaccatgccttgttcttgtcgagctgagcctaactggggagacattgtagtatacagtggacaaatgaatgaataaatagccgaacaaattaatgaataggcagatggacacatgattagtcagccattagtgtttcaagcaccatgagagtgatacttaatacaaagtgtaatgggatcaccagataaattatatgaccagataaatggccgggcacggtggctcacgcctgtaatcccagcactttgggtggccgaggcaggtggatcacctgaggtcaggagttcaagaccagcctggccagcatggtgaaaccccatctctaataaaaatacaaaaattagccaggcagtagtggcacccacctgtaatcccagctactcaggaggctgaggcaggagaatcgcttgaacccaggagatggaggctgcactgagctgagatcatgccattgcactccagcttgggcaacaagagcgaaactctgtctcaaaaagaaaaaaagaaagtaagaaaaagaaaaaagaaaaaaccaccaggattgttataaaatggaacaaacccatattgtgttctaggaaagggttcagggagaagagagtcccctctactgggaccaaaggcaggagctcctcttacagaagaacctaagagctcatgttatccaactctataaagccagtatcatgtggatttcaaaacagaggacttcaataagaggaacacagaaacacagacatgcacatgcacaaacccacgctgaactgtgcagaaggatgaaagggtctggccctctgtgcttaaagctaacactaacagaattgatacacctgcccatgttttatggcaccacacagcaaaataaaaatagaatctcttactttcctcattagctggacttggctgcagcaactgtttggtttggagtagctgtagttgttgggagatggtccatctctggtgcatcaaaaaagtatgcctgtggggaaaaaaagacccaggagggagttaaaaagacagtggtccgggtaagtgtttttttagactccatgctaacagtacttttggactctcacagcccctaagttcttcctaccatatttgccatcacactaaactacaaccatctctgtttacgtttgtctcactaaattgtgcatactttaaaaaatttagctatcatgtactgagcacttactatattacatgacttactcttaataaccctatgaggttgttaggattatcctcattagacagataaagaaactaaggctcagagagactgtcatttgatcaggtgaacatggctaatgagtggtgaagccagaactcaaagctaggtcggtctgactccaaagcacaagctcttaatcacaacattatacagtctttcctccagggcaaagacttcttcatctttgtgtcaccagcacccctgcacagggcctggcacagtatgtaaccaatcaatacctaatgaactgaactacattagcttgctgctaaactagttagttggctttctgcaaataccttgaaaagagagtgctaggcatgctttccctaaaaattcttcagctgggaaatgaaaggtttgctaagtgcttccactcaccatctacaatttaacggtcaaaagtcagaaggaggtaaaggagggaagacataaggtctagagaagcctaacttgagcgaagccaaacttgagcccaggaaaataccaatctcactacccttgaatactggttgttcaaaggaaaggtgaatctgttactacatcaaggctcactgaatgttcatgatacccccttggggtcagtgcccttaggaaggtacactgttggaaagccaacaaccatttttcaccagctctgctctctatcagccagaagggggcaccaacacaacatgttggagctctcccctacctgttgctattccatgttaactctttttgaaaagtttccagatgatgtctttctctgcagactccctctagtttgccccattcccaaagcaactctattacttttaagaggcttcctccttaggaacccttccagcagctgttttctggggcaaggaaagaagagtccctaacttaagtgggggatggggccacagtgctagtgctgggctcctccagttctccctcaggtacactgtgccacaagcccccaggatgcaggaacaaagcctttcttccaggctactgcagggtgcccttgtaagacagaatgagcaaagaggcccagcttctacacctggctctgctattagctcacactgtgactttggacaagtcgctccacctgctttggcctcaactttctgatctataaaattaaaggattagaaaagatgatcttggggctggtgtggtgactcaagagagagagagagattgggtgtggtggagagagaaggaaagagagtgagaaggagagagagaaggcaggcagggaaggaaggaaggaagggaggggggaaggaaggaaggaagggagagagagagggagggagggagggagggaagaaaagtaaataagatctcagctgggtgtggtggctcacacctgtaatctcagcactttgggaggccaaggcaggtggatcatttgaggccaggagttcaagaccagcccggcaaacatggtgaaaccccacctctactaaaaatacaaaaattagccaggcgtggtggcacatgcctgtcatcccagctactcaggaggctgagggacaagaattgcttcagcccaggaggcagaggttgcagtgagcctagatcacactgctgcactgcagcctgggtgacagagggaaactgactcaaaaagaaaagatgatctcttagggccattccttgaacaatcttgaattctatgattcattaattccaaaaatgcttaataacaatcacagccatcatttggggaatgcctactgtgcaccagacatatacttgatcattaatctgctcaaaagtgctgtaacaggccattttatcccttttaaagatgagaaagctgaggctcaaagaaatggagattttcccaaggctagacaactatgtgtctgagctaggatttcaatccagtcgagtccatctccatagtctgtgctcttctaattctccaacacttcctgcaatttggcacctagtctatgtccggtccggatctaggcaccgtggagacctcaaagctgaatcagcaggttctctgtgagtaggggtagggcacagctccctgtaaaagccagcagtaaccacctcaaacttaggcttgtacatctccaaacatacaccaagggtgcagcctctaggtgcttccttagtcatccctgccagtgtgttcttgtataacttagacatcatttacatgtgcaatcaccgaggggtccctggcaagtgtggggctgttatatgcttcactgcactaaggcaaaaacaccaatccgtgttccccaggggagagtgaggaagccaagctgtctggttcagccggtgcccctcagctcaaataactcccctgccagttcctctctctgccctaataataatgtcttccatttacatgactcgtcatattttccatgctgcatatatcattcaatccttgcaacgtaaagatgttgccatggcatgcacgatcggcccctgtttctaagtgaggaggcaggagtccagagaagggaaatcacccaaccaggtgacagtggagctaggactggaacccaagtttcctaacttctggctcagcccttctgcagcgcacaatgcctccagaagaaaaaggaggggctggtcactgtggagaacaaaacccaggcatgatgggcccctggctagacacctgaccacgggatggttcccttcctccagaaagagaaaactgagccttcctctccaggaagaggccctgcaccccacaaggacctccctgctccacagtccaacccgtcccgctcttctgagtcccttacagactgaacagcctcttctgtctcctcatctccactgctttctcatccaggtgtgtaatgggtaaaaagttcaggagagataagaagatgccagtgagaggcaacaaggaagggcattgtcattaagagtgggagacttcagctttggcccgggtaccagctgtgggaccttggaccactcttacttgggtactatggaggaataagcagcatactggccctggcagtgtctgacgacacaggctcctttaatgactttgcatctgaggaacacttcacagtatatggagggctttcacagccagctcatggcatctcacaaaaccccaagaaaacaacaatccctttcacagatgaggaaaccaaggttctgagaagcaagtctcttgcctaggtttgcagcgctgagcatctctcagtccagggcactccctgcttcagaattacgctcttttagaaagttcctgagcagcaagatgggcaggtaaatcctggtttcagcgccatctgccccaaaagggaacaataggcacaggaggtaaaaggtcctgccacaggtactagatgaaatgggttcttttttttgtttttttgagatgaagtctcgatctgtcacccaggctggagtgcagtggcgcaatctcagttccctgcaacctccacctcctaggctcaagcgattctcacacctcagcctccctggtagctgagactacaagcacgtgccaccatacctggctgatttttttatatttttggtaaagacagggtttaaccatgttgcccaggctgatctcgaactcctgagttcaagccatctgcctgcaacttcctcccaaagtgctgggattataggcgagagccaccaagcctggcctgaagtgggttcttaataataaccataatagctccctgcttcactgctcaacctgccctgctcctattccttagagaaatgagaagggcaatgcctcctctcctgcctccttctcctcaccaacttctcagccaggcacgtgaggggaagaacttcagaagagagacgggagatgccagtgagggacgagagatgccagtgagagttggtcacaatgaaaaggatgttcttcagcagacagaaaagtcccagaagagtcacggcagcattttaagggatcaactcagagattccaagtgccagaaattaatagtgtcattctgccatgagtcaaaccaacaggcccgccttgagggcttaaagcttacgcacatgtaaagtgcatgtaaactaggtttgtgtttcacaacttggcactttttatgaaacttgtttaatgataaggcattgggatttcattaatctaatgaaattctaatcagattaatgcatttaatgagacatggttatctacacaaaaatgttaaagatcaaatgatgccaaagaaacatttactcctaaaattgcaaaacctgaccaagggtctggaaacctgccatgtggactaagacaccttcccatggccatgtcctttcctttattagggaccttaacattcttggactctgatttttttttcaaaacctgcaacagggcttgttaaggccgtgggcagcaaattttgtgcacagtgtacagaagacacaaaaccatgtctccttaggatcaaaggaaagggacctaatttatgggcatttacaggacaagttccatgttaagtgctttatagatatcattttatttgcctctcagaacaatcttgtggcaggaaatatacccatgtcacagattaagaaattaagattcagagaggaacaataacatctccaagttcacacagccaatgagtgacagagccggtcttcaatctgggcttatctgactcaaaagcacatgctctctccctaaaaagacacctacatatgaactcaaacactactttaaatgttgttcaccttaaaagtaactccactttcccatatctgacttcattttcaagctttctaccttcaaatttaaaacttttaattcctacctttaaactttaaactttctacctttaaataaaactttaaatttcaaaaatctttctaggtatgtgcagaaaatcagcaaagacatccaaaaacagaatcccccaccccagctccctaactctatatagtcagccctccacatccacaggctcagcatgctcaggctcaaccaaccacgatgaaaaatattctttaaaaatatgtaagttaaaaacaccaatatgacaataaaaataatacacattttaaaatacagtataataactatttacatagcatttacattgcactaggtattatgagtaatctggaaatgatgtaaagcacataggaggatgtctgtacaccatttttatatagagaacttgagcatccatgctttggtatccatagagggtcctggaaccaaccacacccccacaacccccataccaaggaacaaatgtatacagacactcatccacacctatttcctctggtcagaccccaaattctcatcagattactgaaattaggcaaaaccaaagactaaagccaaattctcataatttcaccacttcccatgtaggtgagtctacttaaaatgaaattttatttcatagaatcaatttttttttcttttgagacagggtctccctcggtcacccaggccggagtacagtggtatgatctcagctcattgcaacctccacctcctgggctcaagcgatcctctcacctcagcctcccaagtaccagctacttgcgatgctgaggtgggaggatcgtttaagccacgatgcccagctaatttttgtatttttagtagagacagggtttcaccatgttgcccaggctggtcttgagctcccgagctcgagatccgcccacttgggcctcccaaagtattgggattatgggtgtgagccaacatgcccagcccatggactcaattttaaaagaactgttgtgtctaacagtttgaggtcttttagcatttggatataaaacacaccaaaagaatatacgactgaacccataccaagcagcccacagaaagcagcatatggagcaacacaattgtcacaattgtggccaatgcaacgcgtcggttatcctcacgaacagctggccaaaatgtcattgccaagagagatcctgagatgcccagggcaatcatgactagaatccaacgaacagctttctgggggataatccacagtatctgaaagaagagaaaaggaggagcggggagttcttgggaggcatttgttcattccaggcacatatgtttacaaaggcccctgagccaatcagcagctgggcccccattgccactctggtttttcagtacaggctggaggaacaccaccagcatgtagactgaggcatatgcttttataacaaagggcccaagatccaatgaaggcactaggctccccagacccctttcatgcttaacttctaacttcaaaggagattttttcagaagaacatgagtattgcgctggaaataatgatggtaggtcaaattcttggttgaagtttctaccaagaacagagcatcactcagaatctactccctaagtatggtacttactgcggtggggatataaatgaagagggaatatccatagacacacacaatctccagaaatgaataggagacgatgttcataactttgctgtttctccacatgaggaaaccccagagtgcaagaggaaccagccaggcataggcatagatgatggtagctgctatggacactgaggatgacaggacacaagtttcaatctccatcatgcctttagtagactatcagagcacttccaacaccttattgtacttaaatgctaacatgtcaattgacttcagtggaccacggaatcatgtcttactggtctgtaatccctgagcttggtacagtacctaacacacagtaggcactttagaaatgtttgttgaattaatgaatctttaccattcgtctttgtggtgaggatcaatagtctctcatatggtttttataggtcatttaataactaacaactaatattattaaacaactgaactatgcaactgaaatacttcagagggccacactgcaaatgttcatatatagtagatatttcaatcaaataaaaaccaactatccccttggaagaacatgttctcttcctcggtataacaagagctgacactgacttcctttttttttttttttttttttttgagacagagtcttgctctgtcgcccaggctggagtgcagtggcgcgatctaggctcactgcaagctccgcctcccgggttcacgccattctcctgcctcagcctcccgagtagctgggactacaggcgcccgccaccacatccggctaattttttgtatttttagtagagacggggtttcaccgtgttagccaggatggtcctgacctcgtgatccgcccgcctccgcctcccaaagtgctgggattacaggcgtgagccaccacgcccggctgacactgacttctttagcaaatgtattaaaatgccttgggtagagattaacttgctctgcatgctctctagagttcctctgtctctgaaattgggagatgcagctcactgattaactgcttgaaatattctccagttatactttcttccttaaataaataattccgccactgtggcaaaaatgctattgagtggctcctcagaacagcaacgttcagcatattcctgtacctctctcctcttcctctagtagcagcacgccctggaggattccctttccctcttctggagtggaggtcataaagttataggtaagccatggcaccagccctttctacatgaaaatcagtaggtaattcacttaatgcatcttggcaagaacaaagacacccctaacaattatagtcagactctggttaagacatgaatgtccaaaacatgttttagctcccagaacagttttttcacactgggaattgcctcgttaggccaaatgtaattctgctgatgtactgcctttttcttggataactaagggaagaggaggaaattactcccatggctatagctgtcacttattgatcaactactgggcatcaggtattacactcggtgctttattgagaggcaatgtggaataatggtcaagggcacagactctgtatacagactccatgggttctagttctaggaaaagaaactcttgggggtaagttacttaaccttcctgtctcagtttcctcatctataaaatgggaagaaaaataatatactaccttctaagattaataggagaattaaatgaataaaagcaggtaagaactgttctatgtagaagagcgactgatcaataataaatgctcaatcaagaattagtttttatattgttaactaatatgtagctacatttatttcatacaatctatattgtcattttagagatgaggaaaaggggtcagagaagctaagttgtttggtcaaggtcacataattaacaagttagtagaagcaggatctcatctcagatgtgactcatactttttacataaaacggaaaaatgtttattgatagggccaatgactactttaccagtatatatatcacatcacttcctgatactgggatgcccagccaaagaggataagaacaggtaaagactctcctgagtttccagatccccaggcaaagtggttcactccttcttctatgtcaatatacctacacttatctctgatatagaggttaatatgtactgtttacagcaatagtcatttactagctttctaaccactgaactacttgaaggcaggatctatatctcatggttaatatttactgaattaaactcaaatcaaggttatttgatagagttgggattgaatccaagtctgactccatgatggacaagaagggaaagtgggcatggaaggtagaggggaagaaaagaaggaaggatacatggatacattctctctctctctctctctctctctctctcacacacacacacacacacacacacacacaggcaaatacatatctttctatgtacacacagtgaactagctgaaggcagggtttctatctcatggttaacatttattgcattaaactcaaaccaaggttactggataaataatgggattgaatatatgtgcacatatttttgtgtgtgtgtgtgtgtatagtaatagttaatgtttattgaactctttttggtacaaaccactattctaagctttttatatatattaactctttattcttacaatagtcctgtaagataaatattattatttccatttcaccaatgaagaatctgaggctcagacataaaatagcttgcccaacagagtagaagctagtgagtggtggagctggaactgaagctagcagtctagttccagaactggtgctcttatccaggctacttacagcctctcgacagcagagcaggcagggagagagcgagggaactgagaaagtggtacaggccaatctccgacaaagccaaacttcctcatttgggggcagctgtcatctgcaagtctctaaaagctgttttgttttttcttctaaatacccaatactgacataagaaaggacgttttaaaacaagaatgtcattcacaagcccatccctaggacacattcatttctgcattttcccttccaggctttgatcatttgcagacttctttctccccgcttttttttttttttttttgagacagagtctctctctgttgcccaggctagagtgcagtagcgtgatctcggctcactgcaacctccgcctcctgggttcaaccaattctcctgcctcagcctcctgattacaggcatgcgccaccatgcctggataattttttatttttagtagagacgggtttcaccatgttggtcagactggtctcgaactcctgaccttgtgatccacccaccttggcctcccaaagtgctgggattacaggcttgagccaccgcaccgggtctctttttttttttttttttttttttttttttgagacagtgactcgctctgtcacccaggctggagtgcagtggtacgatcacagctcactacagcctcaatctctgggctcaagtcatcctcccaactcagcctcctgagtagctgggactacaggcatgcaccaccatacccggtaacttttttttagtttttagttttagagacaaggtctcactatgttgcccaggctgatctcaaactcctcagctcaagcaatcctcccaccttggcctcccaaagtgctgggatgacaggcatgagcaaccatgtccagcccagatttctcttcagcaaagttgctaacagaataggcaccagtttggaataagttatgaattttccacatagctctaggtgctttgtgactggcaattgcagatgaccccagctagttgagccatcacagcctaaaacaatgtttctattgtctccaaaatgtggataatacaaataatgccacacaggagaccttcacacacacctttaaattattttgtacacttgtcttagaatatattccagctgtggccaggtgtgatggctcacacctgtaatcctacctagcacctcgggaggccaagatgggagaatcacttgagcccaagagtttgagatcagcctgggcaacacagggagacctatctctataaaaaaatagaaaaattagccaggtatggtgttgcatgcctatggtcccagctactcaggaggctgaggtgggaggattacttgagcccagggaggtggaggctgcagtgagctgtgatcgtaccactgcactccagcctgggtgacagagcgagtcactgtctcaaaaaaaaaaaaaaaaaaaaaaaaggaataaactgcagttgctattcggccttgatttacagctttcccaaagattatgtggactcataacattgtgaatgtacttaatgccattgaattacacatttaaatggtaaattttatgtaatatatattttaccactgtaagaagaaaaagattatgtggatttatatagatgggtggtaaactcatctacacatttgagtagatacattgaaccctaaaacacaaaagcagggctgcagcatctagagatggggcccaggagctcagtgggtaaaaagaactcaaagctagaaactgacagcattccaaatgagtcaagctattcaccaaccttttcggaattcgggcacataatggtacgtcttctctcccagatggatcaagaagttggaaagattcccactaattgctatggcaaagaccaacgtggcacatatccaaaaggggcctgcaaaggaaaccagaaaattcagaaacaagaaaatgaagcataagcctttagattcttacagaatttcttatcttcctcttgtattcatgttagcaaaagaaaatgaattttctagatgggatcaacacttgctgaagggaaatttttttttcaaaggtcaaacacacatctcagtaattagctgccttaaagaaggtggggtgttggtactccaatccaaaggccaaaacgccttccacaattaggtgaatgaagacactgatttctgtatagcttcttttgttggaggatcaccaccgacaaagaaaaattcacaggctttttattaaaccttccaccagaatacatgaagtaaagattacttcgcttatctaagtgccaaatgttagcatcacagagaaagaagttaaatcagacagagcttgtgcagcatacagaaagagcagggcaaacagaacacatgagggcagagtcgattaaacctaccagttcaccacggttgtgttgagtgtcagtgtgtgtgtgtgtgtgtgtgtgtgcttaaggctttttctttttttttttaatgaaaaagtaatacaatgcactatatacacctactgtctacccacaaaaattaaaattaaaaattaaaaaaagtaatatatgtatatggtccagtgtttcaaaaggtacaaagggaatatggagaacagcaagatccactccctctctgtgccccggctctctatctttcctccctaaagctcaccaaagtaagcagtttctgatgaaacctgctaggaatattccactcatgtatataagcaaatgcatgtgtatatgtgcatattttatacagatgataacatacatatatgtcctcctgtgtacccttctattttcaccttaatatagcctggtgagtctatcacagctactcataaaaatcagcttgttctttttcaatggttttaagatataccactgagcagatgagtggaccatgctttacaaacctctttcattatttgcatgatttcgtgaacactatccttgtctctccccatctagaaaaagtactatgtagaacaaatactatctttagattgagagattttaataaattgtatgaatttcatttttcaatttcactaatattttgcaacaccctttgggataatttcaggtaccttgacacgtcacaaaattacgaacattactgtcataggtgagatgactagcagaaacagattagtacttttcaaaggcaagcactggcccctgaaggtgggaaaaggaacacaagcaatcaaatgggtatgcttcaaaaagtcaccaatattagctctccacaaactgcctctttactcactagactgaaagctttctgctgtagacaaggactaaatctcacagtattattctgagtgaccacacataagagtggcaaaaaaaaccaacaacaaacaaaaaaccccacaaagcccctatagccaaaaagctttactgaatgaataaatctgaccatgtgttatagatgagctgagaccatccaagggtatgaccacaagtggccaaaatattaacttacaatacccaaataactagaaaaccaagaatattatgtcctctcagtcattatttactaagtacccactaccctctgctggggacacgatgatgggcaacagagacacagtcactgcctctagtgcacccatgcactccggggagacgatcaataaaatatctaatctcagaaggtagtacagggtgcctatgggagcatatagggaaggtggaaaacctagagaaagggatgtgtaagctgggatctaaagaagaacaggagttcaccaagtgaggacagaagagaagagaggtccgtgaagagggaatagcaggagcagagactgaagtaagaggtaccagttcgaggccaagcttcaggtcaggagtagccagagattgaagagatgggccagagtcagatcatgaagggtcttagaagccctgttgagttaggaatttatcttgagggcaacaggaagcctgtgaattgggcctggtggcttaagcctgtagtcccagctactcaggacactgaggtgagagggtcacttgaggctaggagtttgaggcagcagggagctatgatcatgcctctgaatagctaccgcactccagccttggcaacacagcaagacctcatctcaaaaaaaaaaaaagtgggggcgggggggaatgcggtggctcacacctataatcccagcactttgggaggctgaggcaggcagatcacttgagctcaggagttcaagaccagcctgggcaacatgatgaaaccctttcactaaaatattaattaacttttttaaaggcaggctggtatgggaagatatgtatactaatgtgaagacttatctagcattctctagctgccccatgctctaagctacctaacaactctggcacgggaacagctggagaaacaatattttcaggtggcctgaaaggtccaacacctgcccacccactacctctatgtggcccaatgctcatccttggacacaagcaagataactttcccagcccttagcatttttgtccctctcctattatcatccctctcccccgtttgcaacccttcactgaacctccactgcttaaggacaaaatcctaattcctgaggctgatataaaaggccccaggatctgggctctgtaacttctccagctacccccagtggaaggctggactccagagacttacgacacccactcatcccaggacctgccatgttgcttcatactgccttctccgtttcctgccaaattcctactcttattatgggttgggggtgggagagagccttaatttaggttgtatttataattaaaatttcatattatgcatttttatattatgaaatatttctaacatacagaaaagcacgaagaataacacaaacactggttacctagcatgtcacttttaaaaaatatttttaggccgggcatggtggttcacacctataatcccagcactttgggaggctgaggcaggcagaccatttgaggttaggagtttgagaccagcctggccaacatggtaaaactccgtctctactaaaaatacaaaaattagctggcgtggtggcacatgcctgtagtcccagctactcgggaaggctgaggcaggagaatcacttgaacccaggactcaggggttgcagtgagccgagattgcgcctttgcactccagcctgggtgacagagtgagactctgtctcaaaaaatatatatatatttttaatggtatcattctattcatatccttccacaacatgctttttaaaatcattgtgctaagatttatctatatttatgcttttagctctcattcatttttttaactacagaattccatgtataaatatagtagcacaatgtatccattctcctgctgatggatatcttggttgtttctaaatatttgctattacaagcaatactgctacagtggataatattcttctatatgttgttccatatatatgtgaattcctctaaaattatctacctaggagtgaaactgctgaattatagggtataagcatcttcaaactgctccaatttgtgtaccagttacatacccaccagttacatacctaccatacaaaagtttccactgctccatatccttggccacacttaatatcaatgttcatgaaatctgacttagagtatgtcactcctggcttggggcagtggctcatgcctgtaaggtcagcactttgggagggtaaggcaggaggattgcttgaggccaggagtttgaggccagcctggacaacatagtgagaccctgtctctacaaaaaatacaaacattatccaggcatggtggcacatgcctgtagtcccagatactcatgaagatgaggtgggggaggatggcttgagcccaggattttgaggctgcagtgagccattatcgagccactgcactccagcctgggcaacagagcaagacccagtctcaaaaaacaaaaaagtatgttactcgtctgtccaaactctccaatggctttgcattcaagcaaatgccaaagtcctcactgtgacttatgagaccttacctgtccctccacactgtctctctcacctcatctccttctaggtccccctgttcactctcatccagtcgcaatagcctcttgaggttctttgaatgtactaggctagctcttgcctcagggcctttgcacttgctgatccttctgtttcaagtgctcttcccttagatatctacataaatcactcccaattacttcaggtcattactcaaaattcacctttttaaattttcaaattcacccatttatacaaacacttcatgtccttcttctctctgctattaaattttcacctaagcattcattactagaaaactatatattttacttttctttgcttattgttaagctcagtaaattaaaaattgcctaagggtagagatttttatgttttcactgctgtatctccagtacaatagcaagagctcaatgtttgttgaatgaattgaatgaataaatgaagacaagccaaactgtgtatgtttactaaaataatgagcataaataatcttattttactttttatttctctggttgcaggtggggctaagcatcttttcatatatttattggcaattttttccccagagttgcttggtttattcttctaatttgtgggagttcgacatatattcttgtttctcactgtttgttggttatatgcattggaagtatgtcccctggtctgtggtttatttttttactttacttatggtttattttgttgtgtagaaattttaaattttaggtgaaatgtagtcaaagttatcaatcttttccttacactctgtaaattgtcatctttttcttaactgccttcctctaacctccacccacaacaaaacctaatcctctctgctatcaaacacttcacctatattgtaccttcttcttttaaccacgtctatgagctaatgaggctactagtgtcacagaaaagaagcaagccttggattcaagccctggctttgtcatgagaggcagtatagcatagtgatgaagaaatggattatgagctacagtgttgatttgaaaattgagcccagcacttactagctgtataatctcaggcaagttactggacctctgtgtgactcagtgtcctcatctataaaatggggataataatagtatctccctcatgaagttggatctggcataaggattaaatgagttaatacaggtactgccctaataatagtgtctggcacataataagcattatatgtgtgtttgccattattattgctaactctgtaactacgggcaagttatctccttaatctcagttttctcttttgtaagataaggctaccttggagtatgggaaataaaatagcataaaatactaaaatagtgcttatctccacgcttggcacttataaggtattcaacagatgttagtgttctctcttcttcctcattggggctagggaccatggccttatctttaaatcctcagcctctagcacagagtctagcataaaataaggtgctaaaaattgtttgagcacctgctgtgtgccaaggcctctgccaggcactaaagacactgaggcacagagcctgcccctcaggatgttctcaggctacaagtaagaatgaatgagacagagaaaccaccctgacaaccctcagatgaaaagcatgggccagtgcaatggttttcacaccaggctccctagagtccatatttaaaatcaacatatatgactgctttactatttatcatttctgattgagcatatatatcaatgatcctcactgagcatcagcttcctcatttgaaaagtggggatactttgcaagggttgttgcaagaatgagatatgatcaagtacacacacagtctttggtacagcacctggcacacggacagcactctcttctcccctcaaacacaggccactgttggggccttttcctcaggagtactgggtggacctctgagtttttctcagacagcattaaggtcagggatgacaacaatccccggcccaatcctgttttagacttccactgctggtgaccaaatcctaaaaggagccagctcatctgagggcagagctggaactcagcatatcaatgaaaaagtgtgagaataccttctcctccaacatcaaatggtccaatctccacctagtcaaagtgactaaatttgtctcaagttgtaaagttatttgaagaatttttaaaaatcattctttttatttttattttttagtagagatagggtctccttatgttgcccaggctggtctcaaactccttgggctcaagcaatcctcctgccttggcctcccaaagtgttgggattacaggcggcagccactgtgccaacccagcctttagtagagacagggtcttgctatgttgcccagactggtctcaaactcctagcctctggcaatcctcccatcttagccttccaaagtgctgggattataggcatgagccactgcgctcagccccatttaaagacctttgaaggatatactagtacttgtaatgatgacgtggcactaatataacacataattgtattcctccaaaattacttgcaagggttgctactgaagttcagaaaagtctaataatacatggcatgccccaccaatagtgcagttctccacatttccaggcaaccctcacactcacccaagttcaactgaaatacggtaaacaaatcagtactaaacataccatagagatctggattgctgcggatatataacctcacaaagtttttcccgggtattggcaaaagagatcctttaattctgtcaaagacctggaaaacatcatagcagtaattctactgaagttttttaagtttaataaattcaactactacaaaattgaaactcagtcattagagcttttatgatagtattttcaaatgctaataaccctttacttttgtaagaccattttcagtatataaaggctttcacattatttggttgttcaaccattaaagaaacaagtctcctttacccgtaaaaggaaaggtgaaattggtttccaaacctggtaggtgtccacatcaaagaatgtttggtagtattcaaatgtccagaagggggagcttttcttctgtccagcaagtaactgtcagaaataaaataaaacataatgaacacataagcaatttcttaattccagctgcgtggggtgcaggagggatctgatctaatggaaaagcaaaacgtttgaaacaataggctcttccacattcaataaccaactctgaaatagccaattcgcaactctcagcctgattagaaaaacaagcattggttttgaagtcacaccaaaagggttcaaatcctggcccctccactgaggggagctttggcaaatcactagactcctgctgggcttagttcccttatctagattcaacagtatatagaattatgtacaataataaatacatatacacacatacaacacatacagaaggcagtcagtgtaaatatcttttcgctttttttttttgagatggcgtctcactctctttcccaagctggagtgcagtagtgcaatcatagctcactgcagccttgaactcctgggctcaaacaatcttcccacctcagcttcccaagcagctgggactacacgcgtacaccactatgcccagctaattgtttaatttttgtagagacagagtctcattattttgcccaggctggtctcaaactcttgggctcaagtgatactcccgcctcagcctcccaaagcacggggattacaagcgtgagccactgcatccagcagtgtaaatatctcttcctcccccatccatccacaatcctccctactattgccacctgaattctcaaaaatctgatatattgactcactctaaagtactaaaaatattactactctgacaaaaaaaaaaatcctattgagaagaggcacctgaggagggccatacccatcccaacaacacagctctttggtggcagaatgcatgcccaatgccaggaattgtgcctgtcatcttcagatatccgaagggaattcatacagcaaaaagtacggtgaacactgagctgctttgcaggacaagggcaggtgctataggcagatattttttgttcattataaaggaaaacggatggccgattagaagtagctgtggtctgcagcactcacagagaggagtgaaagcggtgaatgaattcagcaccttcaactgaaatacccaggttcttgcattgggactgactaggcaagtagctcgacccacggagaatgaagaaaagcagggtggggcgatggctcacccaggagcagcacggagacaaaggaacacccatccccaaccaaggaaagcattccccttgaaaaccagcacaagacatggatgccctctcttatcactcctattcaatagtattagaagttctggccagggcaatcagggaagagaaacaaataaagggtattcaaataggaagagggtattcaaataggaagagagtaagtcaaatcacctttgtttgcaagatgacatgtttctatatctaaaaaaccccatcatctcagcccaaaagcttcttaagctggtaagcaacttcagcaaagtctcaggatacaaaatcaatgtgcaaaaattgttagtattcctatacaccgacaacaggcaagcagagggccaaattatgaatgaactctcgttcttttgtatgaatgaactgctacaaaaagaataaaatacctaggaacaagggaagtaaaggacctcttcaaagaaaactataaactactgctcaaagaaataagagaggacacaaacaaatggaaaaacattccatgctcatagttaggaagaatcagtattgtgcaaatggcatactgcccaaagtaatttatagattcaatgccactcccagtaaactaccattgacattcttcacggaattagaaaaaaactattttaaaattcatatggaatcaaaagagagcccaaatagtcaagacaatcctaagcaaaaagaacaaagctggaggcatcatgctacctgacttcaaactaaactacaagtctacagtaaccaaaacagcatggtactggtacaagaacagacacatagaccaatgaaacagaacagagaactcagaaataagaatgcacgtctacaaccatctgatcttcgaaaaacctgacaaaaacaagcaatggggaaaggattccctattcaataaatagtgctgggagaactggctagccatatgcagaaaactgaaactggaccccttccttataccataagcaaaaattaactcaaggtggattaaagacttaaatgtaaaacacaaaactaaaaaaaccctagaagagaatctagggaataccagctgggcgcggtggctcatgcctgtaatcccagcactttgggaggccaagatgggtggatcatgaggtaaggagttcgagaccagcctggccaatatggtgaaaccccgtctctactaaaaatacaaaaattagttgggcatggtggcacgtgcctgtagtcccagctgcttgggaggctgaggcaggagaatcgcttgaacccaggaggcggaggttgcaatgagcctccagcctaggcgacaaagcaagactccatctcaaaaaaaaaaaaaaaaagaaaaagaaagaaaatctagggaataccaatcaggacataggcatgggcaaagatttcatgatgaaaacaccaaaagcaattgcaacaaaagcaaaaattgacaaatgggatctaattaaactaaagagcttctgcacagcaaaagaaactatcttcagagtgaacagacaacctacagaatgagagaaaatttttgcaatctatccatctaacaaaggtctaatatccagagtctacaaagtacttaagcaaatttacaaggaaaaaacaactccattaaaaagtgggcaagggacatgaacagacacttctcaaaagacatacatgtggccaaaaaacatatgaaagaaagctcaatatcttgatttgagaaatgcaaatcaaaaccacaatgagacaccatatcatgccagtcagaatggtgattattaaaaagtcaagaaacaacagatgctagtgaagttgcggagaaaaaggaatgcttttacactgttggtgggagtgtaaattagttcaaccattgtggaagacagtgtggcgattcctcaaagacctagaggcagaaatactatttgacccagcaatcccattactgggtatatacccagagaaatataaatcattctattataaagatacatgcacatttatgttcactgcagcactattcacaatagcaaagatacggaatcaacctaaatgcccatcaatgatagactggataaagaaaatatggtatatatacaaccatggaatactacgcagccagaaaaaggaatgagatcatgtcctttgcagggacatggatggagttggaagccattatccttagcaaactaacacaggaacagaaaaccaaacaccacatcttctcacttataagtgggagctgaatggtgagaacacatggacacatgggagggggagcatcaggaagaagagctaatggatgctgggcttaatacctaggtgatggggtgatctgtgcagcaaaccactgtggcacatgtttacctatgtaacaaacctgtacctcctgcacatgacccctgaagttaaaataaaagtcgaagaaaaaacattaaagaaaaacattttcacaattaaagtcgacagtggcagcaactgccttacatggtggtaaacagcccattcctggaggtactcaagcaagtgttttcaatctttcctttttttttttttctttcttctggagacagggtctcactctgttgccgaggctggagtgtagtggtgcaatctcagctcactgcaacctctactccccaagctcaagcaatcctcccaccttagtttcccgagtagctggggctacaggtgtccaccaccatactcggctaatattttgtactttttgtagaggtggagtttcaccatgttgcccaggctggtctcgaactcctgggctcaagtgatctgcccgcctcagcctcccaaaatgctgggattatatgcgtgagccaccacgcctggctccaagtgttatctttcctacatagcaaggacagcatcaatatctcaggagagaggctaaaacagagggccatgaaggttctttcctactctaatattagaaaatattgagcatgggagtcccacattccataagctaggatctctgctcactaccccagtgttcccctccacaagtgtacttacggaaagtaatggtctgtttgcctgtttcccccaccaaggaagaggccatgtgtcatttacctctgagctgtcattgcctgacactgtacctggcacacagtagacagtgaataagcacataaacaagctttaaaaattgtttaaaaaatatctcaaagacaagttcaaacctcagttttgtcagagtcatcatttcccagtaactcatcatcttcttctcttcctgagcctcttggggatcctggctgatgttttggggtttcaccaggatcctcaatgtttactgtggtggcatctgggtttgctgtcagagaagtggctgcattgccaaattctgaaatcaattagagcacacgggcctcagaaaccttacccacactagaaatgctatactttgaatttaaagacaagctgtcacaacctcagctttgctatagaccctacctgatacaaagggcaaaagctttgaaaaacaaaaaatctcatcaggagatcaatctgatatagaaaaatgactatgaagacaacagaatttggagtcagacctagattttggttctggctcagctagccacttactaaatacacaagcctgagtaagtaactaaacccctctaaacctcagtgttttcatctgtatcatggggagaataacatttattttaaataattttgggagaacaaggaatataatctaagtcctaaactttacttctttgattcaagtccaaaaaattttaatgaaggttattttttccagtaagtctacataatcactacagaaaatatgggaacaaaaatgaaagtgggatcagctgcgcacagtgactcacgcctgtaatcccagcactttgggaggccaaggcaggcggatcacctgaggtcaggagttcgaccagcctggccaacatggtgaaatgctgtctctactaaaaatacaaaaattagccgggtgtagtggcacatgccttgtaatcccagttatgctggaggctgagacaggagaatcacttgaacccaggaggcaaaggttgcagtgagccgagatcacaccactgcactccagcctgtgtgacagagtgagactatgtctcaaaaaaaaaggaaaaaagaaagtagaaatcacaggataaaaaccactcttaggccaggcatggtggctcatgtctataattccagcactttgggaggccaaggcaagaggactgctcgagcctcagaggtagaggctgcagtgagccgtgatcataccactgtactccagcctgggcaagagagtaagactttgtctcaaaaaaaaaaaaaaaaacccaaaaaacaaaaaaacactcttagttctaccacataaaggcaaacactattaacattttagtatatttccttttcttcacatagtgagattcatgccactgatgatcattcatttattcaacaaatatttactgcatgcccacaatgtgccaagtactgatctagaacatgatactataattaattttgcatcctgctttgtcaagattatgtaaaattggggattatacacaaaaatgatttttcatataacagtctcttaaaatgatcacttatgtgactgcataatattccatcaatgaaggttttcttacaaatacaaaaggagtgtctgtgtagaaaaagctttttggggggcagccttaagatgaacacctatcagtgtgatcactaggtcaacagggtgcaaaccattttcaaggatcctgaaccatgttaccaaactgctttccaaaagaaccttacctacttgtgtccaccagcagtgattgagacttcctgtctccgaatatcctaacatactttatttcagctgctcttgaataaaattcagggcagctctgaaccttcgaaggccaaaggaagagtgccagcagggcaccattataacactacaagcagggcaccagtcctagcagtaggacagctgagttcactcttattgcctctcaactatatgagcagttttatggagaacactaaagtgactgaaattaatcaggtagctaatatgcaacaattactgaagcctcaattggcaatgtttgggtagtttaagcaacatgaggttctggagtgagatggtcctttgttcaaggtaagactcttaatactcagtagctccatgaccttgagcaaattactccatggctctgagtctctgtttcttcaattataaaacatagataatacctaccccacaaagagattttgaggatgatgaaataataactatcattacaggtacctcttattgattgtacagggcaatgacatttaaaaagatagtcacaactttgctggagggaattagaccaaggaagatatacttaactctcacagttaaaaagcagtagttaaaataactagaaaagtataactgaagctgggcgtggtggcacacacaaactggtggtcccagctacttgggacgctgaggcaggagaatcgcttgaacccaggaggcagaggttgcagtgagccgagatcgcaccactgcactccagcctggcaacagagtgagactctgtctcacaaaaaaagaaagaaaagtaaagtataactgggctggatgcagtggctcacgcctgtaatcccagcactttgggaggctgaggcgagcagatcacttgaggtcaggagttcgagaccaggctggccaacatggtaaaaacccatctctactaaaaacataaaaattagctaggcatgttggtggacacgtgtaatcccagctactcaggagggtgaggcacaagaatcgcttgaaatgggaggtgaaggatgcaatgatctgagatcatgtcactgcactccagcctgggtgacagagcgagactcggtctcaaaaaaaaaaaaaaaaaaagagagaaaaagagtataattggattgtttgtaatacaaaggataaatgcttgaagtgatggacaccctgtttaccctgatgcaattactacacattacatgcctgtatcaaaatatatgagtgtaccctgtaagtatatatacctactacatacccatgaaaattaaaaaatttttaaaaagcagtagtttaccagggggaaggaatgccagaaggaggaacagacagtaccactttagaagcacaaaggtcaaaaaggccccaaggagggcgataactcctctagttattgggatcaggaaaggtttcttggagaagataccatatgagaaggatggccagaggtgctggggatggcatctcatgcaaagggaaggggatgagcaagacccagaagatggaaagtgtgcccgtgatggagggacagtgacggcatagtttgactggagtgtgggctgcgtgtacccctaacatgacgactcttcacacagtctgctctgtgctggttattcttgtccatctcagctccttgagcataaaactggtatgtgtcttatttctgccaccaacattctctgcttttacatcctggcatatcctaagctagtttcagcctctgctcctttcctgaaacaatgcctttcacctgaaggcttctgacctctactttttcatccaatactaccgttcctccccggagaagcctttcatgacccaccccccgccaccccacccccagcatcctgtgtgcttttctaaagacccaagtccttaacacagttgataaagccctgggtgatttgtcacctgcctcctcctaagcctcaccttgtgtcagctttccccaccatccgtgatctggaacacaagtgttctcccaatcctttaggaaaaaaattaaacttcctcactccacaggggcttttgcgagggccactgtctttaaactttcttgcactgcactcctagataggatggctgaggagggtctctctaatgaggagagatttgaacagagcaaagaagcaagccataaggctatctgaagggagaatgtcccacacagaaagatggcacaaacatcccaagctgtgaatgtacttggtgcataggaagaaccgtgacagcccatgcagcttgggcagagacagaaaggacgagagcagcagatgaaatcagagggttggaggctgcatcatataggggcctcctaagccacagtaagggctctggctttttcgtttttgtgtttgtttgtttatgtttgagatggagtctcgctctgtcgcccaggctggagcacagtggtgcgatctcggttcactgcaacctctgggtttgagcaattctcctgcctcagcctccagagtagctgggattacaggcgtgcaccaccatgcccagctaatttttgtatttttagtggagacagggtttcaccatgttggccagactggtctcgaactcctgacctcaggtgatctgccctcctcggcctcccaaagtgctgggattacaggtgtgagccactgcgcccagcctggctttttcttctagtgagatgggagctactggaaggttctgaaagaatgacatgatctgcttgagttttagaaggactactctggctgcaaagtacagactgtagagggataagggaggaagcagaaagaccagaaggaaggtaaaggctataattcagaaaaaaggtgacagtgaccttgagcatggtgagagtagtggtggaggtggtcagatgctagatgaattttgaagacgaggttgacagtatttgcaaattgaggtggatttctagtacttgcaaatgaaatagatttatctttaaacagtgtatctcttccttagataacagagacagcataagctgtgataccagactggatgggttcaaatcctgattttatcccttactaactgcgtgaccattaggcaaattatttttctgtgcctcagtctcctcattaataaaacaggggaataaagtaactatttcataaagttgacataaggattatctgtacaggatttagaacagtgcctgacatatagtaaatgttaggtaaggtgttaataaaacaagtaagtgggccaggcctggtggttcatgcctgtaatcccagcactttggaaggccaagatgggtggatcacaaggtcagaagttcgagaccagcctggccaatatggtgaagccccgtctctactaaaaatacaaaaattagtcgggtgtggtgacgggcacctgtagttccagctactcagaaggctgaggcaggagaatcgtctgaacccgggaggcagaggttgcagcaagccaagatcgagccaaggcactccagcctgggcaacagagtgagactccatcaaaagaaacaaacaaacaaacaaacaagtgttcatcaatccctagcctaagtcaggctctgggttatgagtcctaatatctccttgaacttttcctccagcactttcatagtttgtaggtatatatttaaatgatcatttaataaatacatgtccccctcactagactgagagcttcacaaggaaactattttgttcactcttctatccctgataactagaacaattgcccggttcctggtcacaaccaggagatatttactgattcaatgagggaatgatctgatcacatttcatcctaatgatctttttacatttttatctactccaccagtggataaacttcttcatctttttgtctccagtatcttgtacggttctaagcacaaagtaagtgctcaataaatgttttctgaactaaagcaggaactgtgtaagcattttctgtaatcactgtactaaatttatgatactcgttaccaatctgaagggttatctggcaaaaaaaacaaaaacaaaaacagctggtgtggacaaacaggaaacacctggatgtggccaacagccaccaagatgtttgaaataatatccttcaatgtgtgaggcagtataggaatgaaaatacttgctgtgactgtagcaacagtgatcataaatataaaggtgggcacccaactggtataccttcaaattgcaagtcatctactgctgccattcggccagtgagtcttctcccaattatgaggaagaaaatttgcagggttctaaaagaaaaaaataggtaaacataataggatgacagtataaagtatctgcaaacaactcttatgtattagaaatggtatcactttcccttgcctcccttttcagtggggtttaataggtttatataaagataaccactaagcatcaggtattattaaatattaaaactgtaacaaagaaactaaccccggggatccaaaggttccaattcaaccttatttggttgtgtatgtaccaggaatgaatctcaactcactgtgtgaatgtttagagagcaggtgcagcctagagatgtaacgatgaggaaggagaggctgaggtttgaaagaggtgatggggacagtgaagaacaaaggcagttcagcctagccagtggttaaaggcacaggctctggggtcagacagagctgggtttgattcccgattctgctgcttctctgctgtatgcgcgctcctcgcggcctcagtttcctcatctgtaaaatgggtgcataacgatacctagtcacacagtgcgggggtcattaaatgggagtgcgtgtaaggagcctagagcggagtcaggcaattagtaggcaatggggtgtcggcgaccctgcagcccgggacaccgcgaagcagaggcagtgtttcagggagaggagctgggccgcggcggcccgggcgggcaggagatcctgaacccccttagcctcgtacaggtcccgcaaactcggcagcctcacctcgcggggttaggcgtcccccgggtcccgagaaggctcgggcctcagttgctccgcgccggtttcggtccagcccagttgccggaagccggagatccggggggcggaacctctccgcctcctccgggaagagccccgcctccttaaagagacagcagctcccagagaaacctgcgtgctgcggcgcgcagagcccgctcccgcccgcccttctcccgaggctgagcctcgagttcttaaagagacaggcgagggcggagtggtggggtcgctgagtgtgactacttgggctggccttgctccagggaacgtagaaaattctcgagtttagggttttcttactgtgtgtttatacctcttttcctaaggaaatataaaatcgggtgatgaaagacgattgtgaaagaaaaaattaagtcacccgcgtcaccagtccctcagtttcttttggccacaaaaatttcactggtgagaaagtacatgatgagtcaattacattctgaatgagtgatcgaaagcgcgatgtctgttcgtatgagcacccccagtaagtgagcgcttggaaagactttacatctaataatagccatatatagtgtatttttttccccaagatgatcatgatcaggctttgtacatgcaggatctctaattctcagaacaatcctgctatcttggggtgattatcctcattttacaaagagaaagctgaggcttagagcatgtgcagggcacttttggttgagtatgtaccaggaatgaatctcagttcatgaattcagctgtgctagtatatcagccacctcttatgtcccatttcagatcatcttggcctcacctgctgcttatttcaccgccactcatcttattccagcgtcagcagatataacctgagtgagcttgcctccagtctatgcctcaggcttctcactttctgcttcgaggcttgtttcttcatgcgatggggccatgggaccttgctggagccaatcagcacccagacaggtgcatcccagaagtgtaggggtagagagttgttaatgtctcatgaggcaaatctctgaccaatggggtcaacacttgatgaatatatgcttttcctgtttttccccctcaggcgccctttcatatagctttcaaactacctagcaggattaagcaaccaaatgcctttggaagtgacgcatttgacaatgcatcttcgcaatgggtctccttccttccctgatatacaagccctgtacttcactcctggtgcttggattcatacttgccaataaactactcatatgaggaagcaatatgaaggcatgttggtaccaaaagtggccccagaaaataaaaccttaggttggcattttctaactgaactgcgcaccagtcacatggcaacaacaaatatattgctggtgttaaggggagagagaaggaggggggtggtggtggtgtgataacacttagaatagaatggcatcacaattactaaggtgtctgtctgcagttgattgggataacgtgcaggtagaagataaggtgctgagttatctagtggctgtggcacaggaacattaagaggacaatggtaattataaggactatggaatggactgggtgttcttaactccattggaaaccttgaaaataaaatgacagacttagaacagccaactgtcaacttgaggcactttgtgaaagctagagagcctctatggcagctttgaagattcttattcttctatagccttgagaaagactggactgaaaatcaggcccaagatctaattgtaagggtggcaaagtttcaacgaagactgaatgcacagcctctgtaggtctcctccatcaaagctggggcattgtcagaaaatgaatgggaacctgagaactgggatgaggatatttgggtaggaaagcctgagacttgaccatccctcgtttccagtttcccttgaatctttcaagggaaaggtggctgtggcagaagtagtcctttcccccttgttaaaggaaagcaaagtcctcttgcttacggatcctgcaatgattacctgcacaacattgctttggactaagggaccaatttaattgtaaagaacatgcaacagtgacacataaccatgggtcttacccactggtcttaccatgtgactcagtcatccaatagtaggtggcctaataggatggtggaatggcttgttaaaggcacagttagggctccaggttggggaaaatactcaggagactggggcattgtcctccggcatgtagtacatgtactaaaccaatggtttatcaattatttataatggtactttgttctaaatacctatagatttgcaaaccaaggggtagcacttcttactatcactttcagtgaaacctacacacatagaatgtgtgcctcctgcgtcacaagtttaagttctgcttggttggagatcctggtcccagggaagcagggaaggcggagagagaacacttccattccagttacagttccactgaattggaagctgtaactaccacttaggcatttttggcttctcataccactgcaccagcaggtaaagaaaagagtgccggctgggcgcggtgtctcacgcctgtaatcccagcactttcggaggccaaggtgggcggatcacctgaggtcaggaattcgagaccaacctggccaacatggcgaaacccatctctactgaaaacacaaaaattagctgggcatggtggcacacgcctgtaatcccagctacttgggaggctgaggcaggagaattgcttgaacctgggaggcggaggttgcagtgagccgagattgtgccactacactccagcctggacaacagagcgaggctctgtctcaaaaataaataaataaagagtgacacatggtggggaaaatcagccctgattactttaagaagttgggggctgggcatggtggctcattcccataatcccagcattttgagagatcaaggaaggaggattgtttgaggtcaagagttcaagaccagcctgggcaacataaggagaagctataacagtcacaaaatttgccgggtttgggtggcactcctgtagtcctaactactctggctgaggtgagaggatggcttgagccaggagtttgaggctgcagtgagctatgatcacaccactgccctccagcctggtgacagaggaaggaaaccccgtctcaattatttaaaaaaaaaaaggtcttgggtgtattttaaaacacttcccaactctgagctctatgattcttctttcagtttctccaatgagccatgctgtctctggcttctgggcctttggccatgtggttccttccaccaggacactatccccactttagccagctgactgcttgccgtctttctggtttcagcatagaaatcacttcctcagtgaagtcctcttgacttctctaaccagaattagcttccccttctccctgctctcgtagcccacgcacaccctccgcctctggacttcatttaggaaatggtagttttttgtttacttgtctattccccgcactagaccatgacttccttgagagaagagggtgttttatttgtcactctatgcccagtgctaaggggagttgcaggccccaggttttgttagaaatggtcccatttctgtctctgccctgggaggtttgagatccatatcccctggggagggctctgactacagaaatagtcaaccaccagctagaagccatgattgggggccgggtgcggtggctcgagcctgtaatcccagcacttttggaggccaaggcgggtaggtcatctgaggtcaggagttcaagaccagcctgaccaacacggtgaaaccctgtctctactaaaaatacaaaaattagccaggcgtggtggcaggcgcctgtaatcccagctactcaggaggttgaggcaggataactgcttgaacctgggaggcagaggttgcagtgagccaagatcgtgccactgcactccagcctgggcgacagagcgagactccatctccagcaacaacaacaaaaaaccatggatgtttgttgggaaaacaaagatctttgttgggaaaaacatctttcattagtaaaagaagagtttgtgtataaagaataactaatagccaaatctactgacttgtgagagagcatctaacaggttctctttaagtgtggtctttttaagtacttgttttttaaaaaattaatcagagggagaatttaagatgtggaatctaccaatccaagaatctctcaaaagctcaggcaaagaattggaaatgataatgattaaaacagacctttgtgcacctggttaggaattttctatctcatgacagaaaggcaaacatcttctgacctgactccttcccctgacccggggttggctgctcctaccctgcaccttcattcagctccgcccagtgttgcctggctgcagcctctctgcccatagaactcagagcttactctggctttgccgagatggggctgccccagccagggctgtggctgaagaggctctgggtgctcttggaggtggctgtgcatgtggtcgtgggtaaagtgcttctgatattgtttccagacagagtcaagcggaacatcctggccatgggcgagaagacgggtatgaccaggaacccccatttcagccacgacaactggataccaacctttttcagcacccagtatttctggttcgtcttgaaggtccgttggcagcgactagaggacacgactgagctagggggtctggccccaaactgcccggtggtccgcctctcaggacagaggtgcaacatttgggagtttatgcaaggtcaggaggctgccacacacttgaggggtgcttgaaatagcagtggtagagggggatgaagagatgggttggaaagtcctgaattctcctactacttttgctgctccttttggaccttcttgtcctcttcctgcttcctgaaactagaacttcttgtggattgtttctctaagtaacatcaccaccttcccaggcactcaaatcacaaaccatccagtctggcatttcagcccctggaacactgctcttactgtacaggctgatctgcctgggctgctctttgcccacctctctgcctggttaactcttgttcaatcttcagactgttgctcaatgacgcttctttcgagaagccaagcccaactctcccatactaggctaccctctctcatctgcctgcttaacatcctaaacttttctttattacacctgtcgcggtttgtaattatgtacggctggctaggattcatgtctgcttccctcactagtctgcaaactcaatgcaggtcgagaccattgctctcacccactattacacccatgcctgatggtggcacatggtagctgctcagtaaatacttgttaaagagctctcggctgggcgtgatggttcacgcctgtaatcccggcactttgggagattgaggctggcagatcatgaggtcaggagttcgagaccatcctggccaacatgatgaaaccccgtctctactaaaaatacaaaaattagccaggcgtggtggtgtgcacctgtaatcccagctactcgggaggctgaggcagaagaatctcttgaaccccggtggcggagattgcagtgagtcaagattgtgccactgcattccagcctgggcaacagagtgagacgctgtcacaaatttaaaaaagtctcagttttctctctctaactccatccactccccagtccaggaaaaccagtttcgtcgacttgagttcttgaccgttccagttttctcttttttgtcctcccagcttctcttcctgccagaacttccttctccccgacttgcccactcagccagcccagcttgtgaatggctgccagattgctcttctctgagtacataccagctcaaccactttcagcagctcccctctgcatttaggatgaagcccaggctcagccttggattccaggtcctccctggtcaggctctagcttttcttctcaattctacctctgagctccccgccacactcatttctttcggacaaactgttgggccttgtacatctcttgtactttcccttgtctttgcctttgctgacatcggctggtcaagaatgcccttcccctctccatcgtcgtctatatccccctcattcatgtgggtccagctctcctgacaccttgtcctccatgaagccacctcagcttcctacagctaggcatgtgctctctcccttcggctcatggctctctgtctgcacctctccttggacactgctgcttcctgctcagcacctggtacctaagcacaagtcttatttccctgcccagtggagagcctcaggagagggtgtgtgtctgatttatctctggattcctcagcatgctcggcccagggcctagatgcagcaggtagagaaggcacctgaggcagttggtttattccgtgtttttcttgtttttctttttctctttttttttttttttttttttttttgagacagagtctcactctactgcccacgctggagtgtaggggtatgatcacgactcactgcatcctcgatttaccaggctcaagccatcctcccaccttagcctccttagtacctgggacaacaagtgcacaccacaatgctcggctaatttttgcattttttgtagaggtggggtttcaccatgttgcccaggctggtctcgaactcctggactcaagtgatccacccacttcggccttccaaaatgctgggattacaggcatgagccactgtgcctggcctatcctgtgtttttgaaagaatgttctttagaacctaagttccacagatatgctttactatgtagtgttgcctggtcaaagtagttgggaaaccctgaatactatatccccctcctatgcaatttcatgtgcaatttcatgtgcacatgagtgtatgcacatgaggagtttacagttccatagaacagatggaggtaataaacaaatccttacagtcctatgaaatgggggaggctataaaaaaatagaacttttgcctggaggacttggaagttttcctggaggaggtggctctggaactaggtcttgaagaatgagtcagatttttgtagcctgacaaggaaaaagggaagagtgttttagaggggaaggcaggagcttcttttgttttgctgttcattcataattttaaaccacagtgcacaaatgacctcagtttattcaacaaatgttcactaattccattggtagtaagagcaatggtaataactaacttaccacatgcccatgtgccaagcactgtaacagaaccaggccaatttgctgaatgccagtcatctgcagttcagttccctgaaagccagcttgcctcatggccaattcatggaatgtacttgcatcatgtaactgtccactttcagtgaggcagtttacattttaaagactgttgaatttggtctgagccccgtggctcacgcctttaattccagcactttgggaggctgaggcgggcagatcacttgaggtcagaagttcaagaccagcctggccaacatgatgaaacctcgtctctactaaaaatacaaaaatcagccaggcatggtggcatgcacctataatcccagctactcagaaggctgaggcatgagaatcacttgaacccaggaggcagaggttgcagtgagccgagatcgcaccactgcactccagcctgggtgacacagcgagactctgtcttaaaataaaataaaataaaatataaaataaaataaaaactgttcagtttgtctctgctccctgctgctgcagctgagactgaaaattggtaggagtgaccagttgcagtggcccatgcctgtaatcccagcactgtgagcggctgagtgggaggattgcttgaacccaggagttcaagaacagcctgtgcaacagagtggaaccctgtctctacaaaatatttaaaaattagtgggatgaggtggtgtgagcctgtagtcccagctactcaggaggctgagttgggggggtcacttaagcccaggaggtcgaggcttcagtgagccatgttcatgctagtgcactccagcctaggtaacagagttaagaccttgtctcaaaaataaataagtaaataaaattaaaaatttttaatggtaagaggaggggactgaagcaaaagaaaaatctatttgcaaaatagagtttactttcagcacattaacccaaagtcccctgaaatcataggtactaacaatacggaaataaacaccatgggcctctgccctggaaggcctcataactcagagtgagagatggtgtcgtgacagggaagcagagggcactgggggcaggaaccctgttaagagtagggtaaggaggtggccaagggaaagcttcctggaggagaggatggtgtgctgattgtctagggacagtgaaaccttggggtgggtgaggaagaggggaatggaaagcagggcagggcacagaggaggagcagcagaggtctgagatgtggagaagcaacattcagtttggcacaagtggggtcccagaggcaggaaggggtgaaggatgaggctgaaggcatcatcaggaaccagagcttacggggccttgtgtgtcgtagctgcaggttgactttatcctgagagtactggtgagttctggaagggtttccaagagagaagtaaacatgatcagttctgcttattagaaagacattggccgagcatggtggctcacacctgtaatcccagcactttgggaggccgaggccagcgggtcacttgatgtcaggagttcgagaccagcctggccaacctgatgaaatcctgtctctactaaaaatacaaaaattagccgggcatcgtggcatgcgcctgtaatcccagctccttgggaggctgaggcaggagaattgcttgaacccgggaggtggagtttgtagtgagctgagattgcgccactgcactccagcctgggcaacaaagcgagactctgtctcaaaaaaaaaaaaaaaaaaagagacatgttgtaactactttggaaacccaccaggccaccaaaaagctctgttgtatgctttgggtataaactctgaactcagagccagagacagagagacgtgaagaatctttactgataatctaaagcaaccgcttcgtttttgagatgcaaaagtccagagaggtgaatgactcgcttagagtcacacagtgagttcttagaagagccagaactagacttctgactctcagctcgtgcacttgctgctactggatacgacagcaggagctcagggaaactctcagccacctccagccctctgtgcgtccacacacgcacacacacacaatatacacacactcttggacacacacagaacaaaacatcgagtaactggcatggtgtggcagaaggcaagttctggatgatttactttctggatacctgagagttaatctgaaattggcttcatttcagcccctgtttaaaatcttctaacgtctttccagctgtacttacaagtgttgtccaataactataaataggatttctctgctgacagatcctgacatgggggttaatttactggtctgggctgttttcccatttatacaaaggagttggacttgatagtcttcactggattctcgaaatggtgttctctgcactgtggtctgtggacatgggcagggtgccagcccccatgcacccatcctttacctctctgctgctgaggaaagcagagagcttagtttaaactttgccctcaatactgaccactgtacccaaccacactataaataattaaacaaatggctctgtctcttccagggtctgaatcagtggatgttgagtttttttcccaattaaaaacaaaatttcatacagctgatacttagagttgatcatgaccataagtcttttgggttctttattttttatttttattgagatggggtctcatgctgttgcccaggctggagtgcaatggcacgatcgtagctcacagcagcctcattcctgggctcaagcagtcttgctgcctcagcctcccaagtagctgggactagacatgtgtcaccacgcctggataatttttttttaagagacagggtcctgctatgttgcccaggctttttgggttcctacctaaagagtgacagagtgactctctggggtcattggaggccagtgaccagccacttggccacaattgacctctgagctgccctcctgaagcctgggcctccttgtcacatgggtgagaaatcatagtgcagtcaaccagcagagactgaggccactcaatgcctcctcaggccttttaagaaaaagtctgacccaaggacaaggagaggggcttcgtatgtccagtgaaactagtctgctttcctctcatatgctaaaaattgagaatataagccaattttgtttcttcttttacttggccaccaggaagctcagagtcaaaatatagctcagttataacaaatgcatgggacctatggcctgtgtgtattccgttttcccctcctgttctacacctcccagaggggcatgattaaaaaaaattctggccaggcgcagtggctcacgcctgtaatcccagcactttgggaggccaaggccggtgaatcgcttgaggtcaggagttcaagaccatcctggccaacatggagaaaccctgtctctactaaaaatacaaaaattagccaggcatggtggtgcacgcttgtaatcccagctacttaggaggctgaggcaggagaattccttgaacttgggaggcggaggttgcagtgagctgagatcacgtttttgcactacagcctgggtgacagaggaaaactccatctcaaaaataaaaaataaaaaaattccatttaatgtgttagtataggtgtaaggagctttaaattctttgcagaacacagagggggtatagttaaccaaataaaccacatgtaagttaagatgccctctactccccatctatctgcaaaccctgtcaattctgccttctccccagctccactgccccacactagctagcccaggcgcccattttctctctttttctcttatagagacagggtctcattctgtggcccaggctgaagggcaatggcacaatcacagctgactacagcctcaacctcttaggcttaatggacgctccagcctcagcctcttgagtagctgggactacaggcacaccctaccagggccagctaactttttttttttttttttttttttttttttcagagataaggtctcactgtgttgcccagggtggtcttgaactcatgggctcaagcgatcctcctgcctcagcctcccaaaatgctgggattacaggtgtgagctactgcatccagacccattgtctttcatgtagacttctccagtgccccctaactgcttatccctcactttcattttcactcttagtcctttctccacagagcagccagagtgatcttcaagtgtaaatctggttattacatggccctactgtagcagtcaggttctggcttgtaagcaacagaagctccctctggttttcttggtcacacacacatatgtacataaaggaacatactggaaaggtgttgagtgctttccagaaacaatatcagctggtcttgattggactgtcttttagcatcaatagttgggcctggatcctgctgtcattgtggttgccatgggaacccatcaccatcccttacaggagcaccacaactgggctgtggatgaattctgccgtctcaatgactcccagaatcaaagatctatgtggaagggtataattagcccagctggggtcactgcctgagccctggctgccaggggcagagtgcgaacctggcccttctgtcttccaaagagcaaggctgggcacactgtttcataaatagaatacaaaatagggaattctaagtaggaaggagagttaggagttgggcagccaaaactgcaacaaacaagtcagatatagtcaagtgcacctatagttccagctactcagaaggctgaggcaggaggatcacttgagcccagaagttcaaggctgtagtgtattatgatggcacctgtgaatagccactgcattccagtctgggcaacataacaagatctcatctctcaaaaaaaaaaaaaaatgaaaaagaaaatatgcaataatattcaccacccttgctttatattcctatgatagcccacatacctaggataaaatccagattctttacaaaggcttatgggagcctgcctgctctggtccatccctaacactccaacccttctcttgttgctctctatgccgggttcctgccagtggttttgtggggccttgaacacaccaagttctctccctccttggggactctgtgtgagtctctttggctagaatccctttctcccttttcccatggctggttctctcctgtttttcatttctcaggttaaatggcagctcctcaaaggccttccctgccccgcctgtctaaaataggtaactcctttatagcctctctcgtaacactgatcacaatttgaaacttcttcatttacgcatttacttacttttttttgcctgtctccccactaagcagacttcaaactgcacacagccagagagctgctggtctcattctctgccgaatccccagtgtgtggcagggagacttgcatattttaagtgctgaataaatatttgtagataggatgagagtatactacattctggagattcgaggatgaatgaggaacaggccctgccctcaggggacaatgagtaggggggtttgggggtatgtggacacttaaacaggccatgtcacagtgcaagactagccatgctccaataaatgtatggtaagggctcaacaatgtcagctctggccgtaagaaaccacaggaggccagctgctccccagagttgtccttggtctaggatggggagttacagaaggcttccacccagggctggcttcatggacatgggaccagtgaatcacacagggacctacactcaaaagggccttgtccttgggatttaatgttctgcagcagctgtcttgaatttttgttgctgttgttgtttttagcacaccagagttgtaaagtatgtcttgaaattcttcataattttatctttgaatctgcattttgtaagtgaaaccctacgggacaatggagcatgccctgaggacttggagcctctgcttgcacaggctcctgccttccacagcctccctgcccctccaggacatgttctctaaggcccactctcccatccccaggtgctccttcctgcttccacccagtgactgctgccatctcctgaccccagagtgggcctggatacagacatgaggaaggtgggggtcaggtgtcacgtcccccagtgttgcatggcagctgtccccatcccgggctcgcagtgccatagtgcaattcgccaagtgactgagggtgggggaagcctcttgcccaccctttcccccatcaaggtacctagtatgttccttacagaggttgcaataccctgtgggttggggtggtgggcaggtgggaaggggccatgtctggctcaacttctgtgatgctgggcggggcatggcatgttggtctggtggctggagggaaagggaaatgcacacacactcggtctctggggtgctgggtagctgtgaggatctgctctcactctatgaataccccaggggagtatgacatcaaatagcaactaaaagacacgatgccaggtcaagagagggactacagaagattagaaatgtctttgtatttcaggctgggcacggtggctcaggcctgtaatcgcagcactttgggaggccgaggccggcggatcacttgaggtcaggagtctgagaccagcctggccaacatagtgaaaccccgtctctactaaaaatacaaaaattagccaggtgtggtggtgtgcacctggagtcccagctactcaggaggctgaggcaggagaatcgcttgaaccccggaggcggagtttgcagtgagctgagatcacaccactgcactccagcctgggtgagactccatctcaaaaaaataaaaaagaaacgtctttatattttaataaatttaatggcactttcccccactttttgaacaaggaaccctgcattttcatttggcggcaggcccagcaaattatgcagctggtcctgctcctagcattcactctctttgtggagctgccttcggtgcctccctacttcatagctcagggaggagatacaagctcatagcaacagcttatatttatgaagcacctactatgggccagtaaccagtttaagcccttatctctattaatttatttaatcctcctaacagtgctacaaaggattattatgccccccttgtggatgaggaaactgaagtgctatgaatagaaagagcactgaattgagagttcagaaaccagaatgttcattttaactcctcactgacctgctgtgtgacctggagcaaatgtgtaaaactcagtttctttgtctataaaatggggggaaaaaatgaccaaccttgcagtattactaatcccatcgcatgacagaatggatgcatacctgccttataaactgcatgaaagggactcctcttatatttaaactgctatgcggcaactgcaggtggtccactgagaccacctaaaaaaacctctcattttagagaggagtaaaccagctccagcccctgctaagtcatgctctctaggtgtcggaccccagtgcctaggacccatcctggggtggggggtagggggaaataaaaataacagaattgaacataggagtgaaaatggtgcttgtaaaagaaagctgtgtgtagggtctcagtttgtgatggttgttgctgtttcaggtaataggccactggtgctgaattttggaagttgtacctgaccttcatttatgttcaaatttgaccagttcaagaggcttattgaagactttagttccatagcagattttcttgtcatttacattgaagaagcacatgcatcaggtacagaaagattctctgcctcttctacctcttcccactgtcttttctctctcccttttccccaggccccatctcaaggttgggaggtggaaggaggaagaggaggggagagggaaagagccactattcactgagcacccaccactcccaggccctgcactgggctaacctcacagtctgtgctttcaaccagggtacagagagcagaacacctggagtgacagggtctggctaggagaggattctaacattttgatcggataaatagggaagtcaagggagaagaactgatttgaacacatttacaaagaattcagacccaaaatgtcacaggtgaaatgacggccttatggctatttttttttttttttttttttgagatagggtcttgttctgtcgcctgagctggggctggaatgcaatagcactcacatggctcactgcagcctcaacctcctgggctaaatcgatcctcctgtctcagccttccaagtagctgtactgcaggcatacgccaccatgcccagctagttttttgtattttttgtagaaacagagtttcaccatgttactcgggctggtctcaaactcctaggttcaaacaatctgcccacctcggcctcccaaagtgctggaattacagtcgtgagccactgcacccagcctatatttgtatttttgaaagaacactgtggtgaagaattaggagaaaaaatagtacttaaactcagtatgaattagaatcatctggaaggctgttaaaacgcagatgtctgggtcccatttctagtccatccacgctgacgcctagggtttgcactacttaacaaacttccaggtgacgctgatgctgttagtctggggacacacacttagagaactactgatctaaacccttgcctctccaagtatggtctaggcgccagcagtcttggcatcctgggagttagatggactctcagttccaccttcgacagaccgaatcagaatcttcctataacaaggtccccaaatgattcatgcacattcaagatcaaggagtgctggtttattggactatttcacgttgaagagcaggggtctggcagacagaagccctgggcttcagttctggatcaatcactaattcctgacgtgaccttgcacattcaaccataatgggaaaccaggccaaatcattgccaagggctcctctgagaacctcagttaaaagtgaggggctatttagtctgcaggaagtgtgtgctgtgtcaatgggactcggtgcctggcctttctcttgtagatggctgggcttttaagaacaacatggacatcagaaatcaccagaaccttcaggatcgcctgcaggcagcccatctactgctggccaggagcccccagtgccctgtggtggtggacaccatgcagaaccagagcagccagctctacgcagcactgcctgagaggctctacataatccaggagggcaggatcctctacaaggtggtgacctggggacagggggcccagggagggcaaaggggcccagggagggcaagggcaaagagaaggctttgcatcaagcagaactggattcaaatcaccacccagccacttaccagccatgtgaccatgggcgagtgctttcacttcttggagttccttcaatttcctcttctgcaaaatgggaatgttggtctccacctcacgggggatgaaataatgcacacgaatgtccctagcatttggactggagctgcatcctcccggcttccttttgaacccagatgatggcccagtcctggtctggtttcaaactcagagacagagaatgttgtttttgttctctgttttttgggtttctttctttcttttttttttttgagacagactctcactctgttgcccaggctggagtgcagaggggtgaccttggctcactgcaacctccacctcccgggttcaagcaattctcctgcctcagcctcccaagtagctgggactacaggcgcacaccacgcccagctaatttttgtatttttagtagagacggggtttcaccatgttagccaggctggtcttgaactcctggcctcaagtgatctgcccgccttggcctcccaaagtgttgggataacaggcgtgagccaccgtgcccggtctgtttttgttttatgaacaatgttcagagaggggaattgacttgtccaaggtcacgctgggcaaggctctgatttcaattctaaagcccttgatcgggtgggccagaaatgagaaggtctgaagctgctaacatttgcggcaggcctgaaccagggctggcggggtagaagtctcaaggggaatggaacccgtggtttggagctggaaatgctggacgcagggatgtgcggcagaaatgcatttcaggctccctttcttgtgattgcttcctctcaaaagttccagcctggtcagggtgagggaggtaagcacagcctctgactctttagacacagttggcttggcctcccttaagaaggtagaaactacattttaaagctattgaagggatttcaagccttggagagcagatgaaaccaagtatgtggatgctcctctgtccacagatcaagatcaagctgaccctacctattcagataaaacaagcaaaaacttgcaggcaaattcccaaggtgcaagggtcacagtagaagaatgtgggtccttcatcctttcctgtaccttgggacatggttcaggcatgattgaggcaccctgggcactgaatccctaccttgggttaggccctgtgcaaatactggaaacacaaaaatgaattgaaaatgactcatacctagccgggtgcagtggcttacgcctgtaatcccagcactttgggaggccgaggcaggctgatcacttgaggttgggagttggagaccagcctgaccaacatagtgaaaccctgtctctactaaaaatacaaaattagccaggcgtggtggcgcatgcctgtaatcccagctacttgagaggctgaagcaggagaatcgcttgtacccgggaggcagaggttgtggtgagcagagatcgcaccattgcactccagcctgagcaacaagagtgaaactctgtctcggaaaaaaaaaaaaaaaaaaaaaaatgaccggccgggcgcagtggctcatgcctgtaatcccagcactttgggaggctgaggcaggcagatcacgaggtcatgaattcgagaccagcctgaccaacatggtgaaaccctgtctctactaaaaatacaaaaattagccaggcatggtggcatgtgcctataatcccagctacttgggaggctggggcaggagaattgcttgaacccgggaggcggaggttgcagtgagccgagatcgcaccactgcactccagtcttggcaacagagcgagactccgtctcaaaaaaaaaaagaaaaaaagaaaatggcccacacccttacttcaaggtactcacaggctgagggataaggaagacccaagtaagactattacagtgtcccaactgctgggggactccagagcaggggtcagcacgccttttctgtatagggcctgatagtaaatattttcaactttgtgccaagtaatccctgtcgcaacaattcaattctgctgttatagcacaacagcagctgcagacgacatgcaaatgaaagcatgtgaggcatcaggactaacctggctctcagactgtaagtttttcaacctctggggaagggtaggcttctcagagggggcagcaattgcttgggccttaaaggataaggagttggcctagtgagcacagtgagtgaaaatcactgcggtatagggaagagggtgggtggaggcactgaggcatagtagggcagagtgtgaataaacgattggagacattggggttacacaggggtctcattctagaccaaggggtttggtcttcatcttagggcaaaggagagccactgacgggtttggagcaggaaagagacatgatcggacctgtacttagaacgttcactggctcacggctgtaactctagcactttgggaggctgagccgggcagatcacctgaggtcaggagttcaagaccagcttggccaacatggtgaaaccctgtctctactaaaagtacaaaaaaattagccaggcgtggtggcgtgtgcctgtaatcccagctacttgtgaggctgaggcacgagaattgtttgaacctgggaggcggaggttgcagtgagcaaagattgtgccagtgcactccagcctgggcgacagagtgagactctctcaaaaaaaaaaaagaaaagaaaaagaaagttcactggttccatggccgggcgtggtggctcatacctgtaatcccggcactttgggaggccaaggcgggcaggtcacttgaggccaggagttcgagaccagcctagcccacgtggcgaaaccctgtctctactaaaaatacaaaaattagccaggcgtggtggagtgcacccgtattccctgctactcaggaggctgaggcaggagaattgcttgaacctgggaggcagaggttgcagtgaatcaagattgcgccattgcactccagcctgggcaacagagcgagactctgtctcaaaaaaaaaagaaaaaagttcactggttcctggttgaaaaatggacaggagggagcagggactaaggactggggatagctgggaggggtggcagctgcccaggctgtaggatgaaaagggctgacctagggcagtagaactggagaggcagagatggttctgaggtaggatgggtagaacttgatgtgaaggctggagaagattaggccagtctgaaggtctgattatggaagaaaagcttatttgtacagaacccttctctttttgaaagactatgtcactttatgtcctctagtttttctacttctctgtccaaccttcctgttaactgctgatgccactgtacacactttctcaaccacctcacggttgcatctgccattgaattagccatgctgatggctcctacacagacatcatttgaccacctcttgcaactaacctccagacctacatgttccttacaacttggaaatccttacaagttgggaatgcctgattcgtttctcttgcagggtaaatctggcccttggaactacaacccagaggaagttcgtgctgttctggaaaagctccacagttaatctggacagatacctcaattctaggtgaccaacgggagggcttctcaaggcttagctctccctgagacccagctggcttttacccttgacctgtgtccctagctgaatcactagctcagatttttctgatctaagcaaacaactcccagctgaggaatgcaggccacagcacccaatcaagacaaattgttattatcagaaaatgaagcaacacttgagctgttcaggccagttccctgttgaagaaacagttccctgttgaagaaagtagagcctgacactgctcccactttggagaccacattccctgcacacggtctttgagagagcagttgcactctacaggcacacttctgaggtacggtatctctctccagccactctgataccaagtaattcaagctggcattccttctattagggaaattcattttacccaatttgcatttatggaattgatcatttaagacactaaattagtttttagaaccaattatgggaagaattccagttgttaggaagagatgaggagttggaagaggagggattagaaacaggaggaggcagtcatcctctccttgccaaaagatttaaacctgtccacattggtggtgatgatgggtgagtttccatggtaacacatccctaattttaccagggaagaggagagtactcactttaccatctttgaatatatttcatagaaatctagctctctgtaccctgaaatcttccactagcctcacttttcaacagagtcatctagaagggagggttggcttcccaaaagcataaccttgaccaaaccaaacaataggcaccagcaatgctgtcattcagttatgcagaagctcatttgtgaaattctgtttctctgatttcttcgcaagtctcttaatggtcatttgtgttagattacatcaaactgatggatagccattggtattcatctattttaactctgtgtctttacatatttgtttatgatggccacagcctaaagtacacacggctgtgacttgattcaaaagaaaatgttataagatgcagtaaactaataacagaattattaaaatatatcaggctattttggatggcttccgtgtgatctttacattttcttttccaatttgtatctgattacccagtgtaatctgaccagcaaaaataccatacgctgaaagggcctcattttgggggaagaacattcaggccctatgttacatgttaaatgtggttttgtcttatgaactcctgctggagtgaaataatttttcacattggaatcaaattacctttataacatgacataaaagaatggatcaggagaccttttgctagcatgagaacatattctctttagctatactttagttgctacaaagttaatattattaatgttgtcactttattattttaaaaatagttattgcaagaggctgaggcaggagaatcacttgaactcaggaggcagaggttgcagtgagccaagatggtgccccttaattccagcctgggtgacagagcgagactccgtaaaaaaagttattattaatcatctaccaggcacagtcactttcagatatgttatctcatttaatctctatatatctcaaagaggagatgattatccccattttacagatgaggaaatcaaggctcagagagttaagtaacttgcataacttctcagaactagtaagtaacaagccgagattcaaaccggatctctaacttcaaggccagagtcctagctctgttcctgccagctgggtgactttgatcaagctgccttggtatcttgacctataaaacagggtatcaatagtgcctagtccatagattcatgagtagagcactcagaactgtgcctgacttggagaaagtgtcatgaagtgttggctattattacgattatcataattattgtcccacaactgcttcctcgggcccttttttggggggttggaggtggaaggaggacaagacaatatggatgctgaataaaaattccccatcctaccaaagccactcatgaccaacataggcatgagtttgtgaggctatactgaaaatgagaagctgtgacaatgatgggactgaagcacagatgagcactcactgttcctcctaagtactaagttgcacaaaaggagacaggatgtaaggcaagcctcttctgaatcacttctctgatggtcttccaattcgtgtctacaaatgcacagaaatctccccattttcactaaataatagtagctggaactgaggagcttttcagaatgacaaaaatagacccccggctttccaattagattctcttcaacttaatgcatcaaacattgagcattgattcttttctgggtgcagagttatgcaaagatggacgaggaagagctgttgtcctccagcagcttaatctcacaggggaccagacatacactccaatgaccataactcaaggtggagtatatgttagagtgaagactaagtgctcagagggcacagaggagacagcaatcctctgagctgggtgaatccaacaatgctttttggagctggtggcatttgagctggtcttcaaagatgcccagtacttccataatttgggatgggagcctggagaagatgggaagggagaagggcatttcaagtgaggagaactacaagggcaaaggtgggaaaagggctatgtgcaggagactgcaagaggtttgggttcaattccaatccttttgttttacagttgctagccataggccagtgtagttcaatggttctcaaacttgggcatgcaacaaaatcacctggagggcttgctgcaacacagattcttggttctcatctccagagtttacgattcgacagatctgaggttgagctagggaatttgcattactaacaagttctcaggtgaggctgatcctgctgtcccaggaaccacactttgagaaccgctgctatagtaggtgttgttggtgctctgcccagatgccttttaccaagccattgtactcatgagccagctgctgtgagtgttggctgctaatggctcacagatgcactctttcctgagaatttgccctcatgacaggagctatcttacccagaaatacctgtgaaattatgtccttcacctgagtgtggcccacagccagtgactgatggatttgaaattccaaagccttttcccttgctgcaaggtggggcagtctacttctccggtgccagtcatgcttcagagctccctatgggatcagactgaggctagacttcagcagaagccatgtttaatttttccctctgcctgatcctgcttctctcacttccttagaggtttctcctgagagcgctccctcaataaatcactcttcaaagaatccttgttggaggctctgcttctagagaacctgacccagagcagtccccttctgggtcttttctgattatgagtcttcattagtggggcttgttatctgctgaaacatagtgtgggatgaggagtcaggtggcgcaatctgcaactttcattgacattcgctgtcttgagtagcctattattaactaaattccttcctttgagatggggctcagggaaatccccttcagttacactccctttactttggatgctttttcaccttctgctatggattgaattgtgcccctctaacccccaaaatgcatatgttgaagatttaacctccttttatttggagacagggcctatatagaggtaatgaaaatcacatgaagtcataagggtgtggccttgataagacaggaatagtgtcccttaagagacaccagagtgcactctctgcacacacacacaaagagctcgtgtgagcacacagcaaggtggcagctacctacaacgcaggaagaaagggttcaccagaaactatgccggcaccctgatctcagacttccagcctccagagtggtgagaaaataaatgtctgttgtttcagctacccagtttatggtattttgttacagcagctggagctaagacaacttccttcatcatgctttacctccagcagtctcctctggtgtatcctgcctgattctctccagctccatcttccctgccattctgttattaacctcgaggctctctggagacattctccatcctcctgagccacctgcagccctcttcaatctaatcaagggactgttggataagcctttcataaccatgacacgtttaataaagtctctagctttgagagaacatatgccagttctcagcttcttccttcaccaaaatcctcatttcacagtacttagtgagtgggcgtcccattttgatgttagggattatagctgcttccttgaagataaaatgtttttctttttataattctttttgttgtgaatgttttgagaaaggggatggagtaaaaatcgctttaccccatcatctttaaccagaagtatccatttttatatttataaacatatatatgtatatatataaaattcatatcccattataaaatgatgtttgtatatatcatactttctaatatatggctgcgtagtagtttccagtttttctgtcttataaacatcattgctataaactttgtccacttatctttgtatattcctttatctgattattaggctatatttctagaaatggaatttctgtgtcaaagactacatgcatgtttaaaactttgatgtacactgccacacactatctcccagaaggctatcagggtcaagttacaaagggttgctggaacatcacctagaaggtgaagcccacaaaggatgcctcccccagcctgacccctgcagagaggcattcctgagagagggctcaacaaatgcaatatgctataaaaaaaaatctgtataaatgagtgataaacacaattttcatttctgtaatatttctttgcctagacttggtacatggtaaaaaggtcattaaatttttacttttttatccatcgctttaaataagtatttactggtttaaactttatgcaaggcgctgtgataggcattggtccacagtaagtgatccaaaaattcatatattgttgactagctttattcaaagctcctcaaagattctacagtataaagagatataggcgtgcaaataaatgaacgatgttcacttattcagtcaacagatatttcttgagaatatatgtgccaggcactattctaagccctgaggatacagtcatgagcagaagcaaaaaaaccccctgccttggggagcttacattctagtgagagagatgataaacatgatatacatggtaaacagaaaaaatacgttagacagttataagcagggctgtccctataagggtgagagagccccgagtaattcaattggattaaatctcctactcaagaggatcacacctgaatgcaggtggcactgccctcatctttcaaaggatacttgggccatcattaatatcattaaaagaaaaaaatttaagtggaattttaatgatagaaatgaagagtcaggtataagaactcctaaatacagaacacagggtgactgcgtcaggtccctaacctaagaaaagaagaaaaataaaacagggaagaaagatttaatgtgtttgtcttgcgagggtaaggtgcaggaacactctaattttaatagggaggccagagaaaggcttattgagaaggaaattttgtgtaaggacctgatgtcaatgaggaagccagctatactgacaccagtggcaagagcactacaggcagaggaaacagcaaacacaaaggcctcaatacatagtacacacagcacagtggcagtcaggagtccatgggcaggtggagaaaaggccacatgaaagggaaagaggatgccagttgaggacaaatgagagtttaaaaaggtgaggggctgagagcagtggctcacacctatattcccaacactttgggaggccaaggtaggaggatcctgtgagcctgggagctcgagactagcctgggcaacatggtgaaaccacatttctataaaaatacaaaaaattagccaggtgtggtggcatgtgtctgtagtcccagctacccaggaggctgaggtgggagggtcacctgagcctgggaggtcaaggctgctgtgagctgtgtttgtgccactgcgctccagcctgggcaacagacctgctctcaaaaaaaaaaaaaaaaagaggtgattggggtagttcagcagtgaaatacaaaacaaagcaaaaaggtaaagctacatatcatatctattgcctgaaatgtggagtggtttaaggtgataatgagaatgagttttttaaagcctagaaaaatgaagtttaaagcatgctgttttcaaataccgtatatgaaatgggtgttctacagtcatcaattgtttcctgcatccacagaagacagagaaaaaagacttaaagataactcaccaggcctgtgccaaagaaatcaatcagataacctctggagatcccttttagcaatctgtaagcctcaacacagtgtttcttacacaaagagttattgccatttcaatttagaaacttggcaaaaagaaaatgctcagcatttcattttattgaacatgaacacaattgctataattcacattccttctcaaaaaccttaaatggttccagtgttacaagaaaatacctgaaagcctgtgatctagccgtaatgttcagttttagtttcactttttgctctactcagacttttttattcatctttccccaaattcatcattatgaatgactactcaccttcacatctcttatctggtataccaaggtggcttttgaaatgcctttcctactcttctccatttaaaatttgcttttccgggccgggcgcagtggctcacacctgtaatcccagcactttgggaggctgaggtgggcagatcacctgaggtctggagttcgagaccagcctggccaacatggcaaaaccccatctttactaaaaatgcaaaaaaattagctgggtgtggtggcaggtgcctgtaatcccagctcctagggaggctgaggcaggagaatcgcttgaacccgggagacggaggttgcagtgagccaagatagcgccatcccactccggcctgggggataagagcaaaactacatctcaaaaaaaaagaaaaacttggcaagactccatctcaaaaaaaaaaaataaataaaattaaagcatatataagtagaaatactcctacaatgaacctccatatatctatcacccagattcaataatttattgccacatttgcttcttcaactaaccctctttcctttataaaggctctgcttaaatagtaagcaaattccagattatcaggccatttcagtcatccatagttctatatgcatctcatatgctttatatgcatttcagtcacccatagttctatatgcatttaagctcatgcattttattacataagcttaaagccagtatcacacatagtaaaaggaataacacccagtctacaagaaaatttcctcaattatcttaaaatgtccttttttggtcaggcgcagtggctaacacctgtaatcccagcactttgggaggctgaggcaggcagatcacctgaggtcaggagtttgagactaacctggccaccatggtgagacccccaactctactaaaaatacaaaaattggccaggcgtggtggcaggtgcctgtaatcccagctactcaggaggctgaggcaggataattacttgaacccaggaggcacaggttgcagtgagctgagattgtaccactgcactccagcctgggcaacaagagagaaactccgtctcaaaaaagaaaaaaaaaaagtcatttttcagtttgtctattcaaatcagcatccatcacgatccacacatggcatgtggtcataggagctcttaggtctccttgaatttagagcaggcccctttccttaattaacattttttatgccactgactttttgaagaaaccaggtcgcttgccctgtaggatgagccacattctagacttgtctatcagttaggataggctaggttatactgtggtaacgagcaattccaaaatctcattggcttaaaacaatgaagcttaatttcttactcctcctacatacccatctcagattgagctacagctgactgataaaaacagaattcctttacccaaaatactgaaaagaatgtaaataaaaacttaaacaaattgatacaaatactttaaagtatatcagtgacaacttcctgtttaaataaatatattgttaaaaaatcatgcaagagcattttgttataattactaggaaagatttgaggagccctgctacctgttaaacatcagtatcacttccagacccagactgataaaagtagttactgtgtagaacattgttggtcaattacggcacaggaggaaaagaactccgaagggtctcacataggcaatcaaatgcctcagcctcgaagtcaattattcttcatctcattggccagaactggtcacatggcactacttaagcaaatgccagaagtattatcttgccacgtccaggaaaagcacaaatctggacatttcagtaagctgtattactggctactagtgtatttgattccttgcagtgtcgctttacttgttcctctatctcttgagtttcctgaaaatggaggttatctctagagtttgattaaattcaggttcagtaattttggcaagagtacttcataggctggtctgtgtgcttcacataaaatcacatcaggaagcatactgtgtttgactgtagtagattgtagcattaatggctccctctcaccccagcccattttttcttttttttgagatgtagtttcactcttgttgtccaggctggagtgcaatggcgtgatctcggctcactgcaacctctgcttctcaggttcaagtaattctcctgcctcagcctcctgagtagctgggactacaggcgcatgccaccacacctggctaattttgtatttttagtagaaaacagggtttcaccgtgttggccaggctggtcttgaacccctgacctgaggtgatttgcccacctcggcctccctaagtgctgggattacagtcatgggccaccgtgcttggccctttttttcagatttccttgtattcatgcccttgggcaggtacctcttgttttcactctgagcttggacacatgacatgatttggcaagcagacaacagcaaatctgatggcaaacagagactcaaagaccatttgcactgtatttagagatagcagaagaaaaagaaaactttgcacactggggatttccctctttgctacttttcagaaggctgagaccatcatctgaaaaagcctgggttagccccctggaggacaagaaacaacttggagcagagatgaacagtccttgctgaggcacctagatccctaacctgcaaaccttaaaatatgtgagtgaagtcatcctacactatctagaccataggagttgccagctgaccacagatacagcaaagcaagcacaagccagaaaaaaactgccagcatatccccagaattgtgagcaaatgaaattgttgcattaagccactatgctttgaagtggtttgtaacagagcaaaagctaactgatacactggttaatccatttttaataaatcaatagattcagatccctgcattgtaaagttccccaccaatctttcaattaatgctcatccactgattgttgcctatatcaatgtttaatttcatgcaaatcaataacttttttcctttttttttttgagacagggttttgctctgtcactcaggctggagtgcagtggcacaatcatgactcactgaagccacgatcttctgggctcaagcaaacctaccacctcagcctcccaagcagctgagactgactacaggcacgtaccactctgcctggttttgttatttttaactttttttgtagatatggggtctagctatgttgctcaggctggtctcgaacttctgagcttaagccatcctcccaccttggcctcccaaagtgctgggattataggtgtgggccaccatgcctggactaatgatgattctctaattctatcatatcttccacatcaatgagcaggaattcttctgcaaagcactttctctcatctaccagggttatgtctgtacatgatagatgcccaattctttccttttaaatacaaatattcaaatgagtaattctgccctagttacatcccatggagtccaatgagggttttgttttggtcttttattttttctcttctatcaatatggattcacttttaaatatattcagtatggttgtagtcaactgtaaaattttttttcctgctcaaattgcccttttttttttttttttctaataagagtaccttcatgttagcttctgtatcctcttgacattatccattagtctactttctggcacaacaaaatgtcccaggctaatcttgtctatttcttgtcacacttttggaattggccattcctccaaagagtcttggttccaattaatgggaaaggtatttagagatcacaatctgggtatttgatgtgctcactgatacttggatgtcactgcttctagatcttttcatggacttaagaaatagtattcttaaataagagaaagagggccgggtgtggtggctcacgcctgcaaacccaatgcttcgggaggctgaggtgggcagattgcttgagcccaggagtttgagaccagcctttactccagcctgggtgacagggcaagactttatctcaaaaacaacaacaaaaagtaagattatgtgtttctaacccttctctgaggttttcaagccagaacaaataaaagtaaaggccgggtgcggtggctcatgcctgtaatcctagcactttgggaggccaaggtgggcagatcgcttgagctcaggagtttgagacaatcctgggcaacacggtgaaaccccttctctacaaaaaatacaaaaactagccaggcatggcgttatgcacctgtagtcccagctacttgggaagctgaggtgggaggatggcttgagtccaggggatggaggctgcagtgagccaagatcgagccactgcactatagcctgggtgacagctagaccctactgcaaaaaaatattttttttaattaaaaagtaaaatcactcgttttacagggcccacctcaggttccataacctcagtgaaacccttccataagtactttctcttttctgacttcttacattgtttactgtctatattgctcacttagtcctttgcatcaatcaatcaattaaaaaattaatgcactacgatctgaagagcaccagagtggatgctgtggggatgcaatgtattacccattaaattttcatgtgcagtcacttccttgattaagctatatactgaagccaaacctttctaatttcccccatggtggccagtactgctgattgataaaaacagaattcctttaccccaaatattgaaaagaatgtaaataaaaactgaaacaaattgataaaaatccttttaataaagtatatcagtgacaacttcctgtttaaatatattgttaaaaaatcatgcaagagcattttgttatcattatgaggaaagatttgagactactgttccttctgcagaaacgctatgcacagatgcaaaatgatcaaaggctgatacaataatgaatctcaagtaagtagcggagccatcatgtgcctgtatgggaaaaaaatcaatataaatgcttttagcagtgctagttaactgttaacaagcagttagcaaaagaaacagcttgatgcaagagtaatattctaaatatataacaacacataaggccagctacatataatagttgtggtacatatcagctaaataccagccttgatttgatgaaaaatagcaactggagctaaaaactgcaactctcattttttgtagggacagggtctcaccgtgttgcccaggctggtcttgaactagcctcaaagctagtctcccaaagtgctgggattacaggcatgagctaccatgcccagtttctaattttttaaaagtgtcagctgggctcagtggctcacacctgtaatcccagcactttgggaggctgaggccgacagatcacctgaggttgggagtttgagaacagcctaaccaacatggagaaaccctgtctctactaaaaatacgaaattagctgggcgtggtggcacgcacctgtaatcccagctacttgagaggctgaggcaggagaatcgcttgaacccgggaggcagagattgcagtgagcagagatcgcaccactgcactccagcctgggcaacaagagcaaaattccgtctcaaaaaaaaaaaaaaaaagtgtctttctaaagtatttttcataataaagaagtttcctttggttaatgttgcctcagaatacgctaccctgaagcatgactacatttttatatttatataatttctctggaaagcaattagccaatatattttaaaagctataagtatgtttacaaccttgcacccagtaattctattccttgaaatttaatcttagaaagtaagaaaaaaggtgaaggtaccagtagcaggaatatgcatagatgtcccctgtgtattacagaggggacaaactgtgtaatgacagagggaagaaaaagaaaattagtttaaatgtatgccaactggcaaatgttattttaaaattgtacttacgaagcctgtgatataatactaagttaaaaaaaaagatgacacaaaattgttcacacattattattctaactgtacagcatatggtcaacaactagaagaaaataaatacagtaaaagtttttgtgacagggtaataaaattctgggtgatttccagcctcccattcccccttgctattttccaaattttctataatgctgtaaccctccacagtggagtcctgaaacaatatacgaaaggtagcaggggcttactaatcataacccactaggtaaagacagaaaaaaacaggaagataaaattcagtaacattaatcatttttcaggacctcactggcctccccagtacttgggtgaattttggtgggagagaaaggaactaatgggattcaaaaacttcctacagaattttttgaaacactgatttaatagcagcttctggcaagttgtgaagaagtaaacttaatggataaggtactattttaaccctcatttagggaaaccttaattaaacaaagcatgaccacctaatagatattcagttgttttgtgtttgtctaaaaccagggcctgaccaactaccaggaatagcggaactcctgatgaggcagcagcttcctcatcaacgggcattcatttcacttgacaagcaaagcccaatggaatgttgtcgaaaaatactggttgtctttccacctcatctctctttggcttatttgttgctgatcctatgctctagttccccttatatgaatctcacttgtcctttcatgcttaaattaacattcaattttggcatcgcgacccttttttcattcctattctaaaatgcctacagaatcaaatgaaagaaagcaaaccaaataaatacttcaaagtaaatgaatgagaaaaataaaacaaaaaataaatgaattgttttatcttgccgtcactctctatgaaaggtaagaacctaatttatgaatgtacatttagcttatattattattgagaataactttctctaccggttgatttaggtacaaacctataatatcatgaggaaatttattaactatgactatggagataggttaaagtctaaatacattgtgcaggttaatttttaattctataaagtatattcacttaccacaatttcttcattttgaagctgcccctctgtgtgtaccaaatctaaaacataaatgtaacagaagaaatgagttaagggtcaaaatacatgagaatagctattgaaatttatgttcagcaaaatatgatatctggtaaattatgagaccaggtttgaaggaatcatcgtttgcatgttgaaatttaatttaaaaatagaggtatatgatacacaaggcaaaaaagataaactatgagctataaaatatcctagtgagtataagcaaaaggaaatgcaaaggtcaattatattaatagtaaaaggatataaggaactgataaaatgtgaaaatttctttttaaaacatttatttaaaaaaaatccccctttcaagaaaaaaaagtgaacatttgaggatccagctactaacagaaaggagccattttgccatagccacgggaaacaactagagctgagtttctcagtgaaactttcactatgatgcataattgtgtggcccatgaagtaatcttttctggtatccaaattttaaaaatgtttccttatgtaattttagagcagattaatttatttcatcatgagttaatcatatcaaacaattcttctggaaacatgaaagatttaattgctataatggtagctaatgacagccgggcacagtggctcacgcctgtaatcccagcactttgggaggccgaggtgggcggatcacgagttcaggagatcaagaccatcctggctaacatggtgaaaccctgtctctactaaaaatacaaaaaaattagccgggtgtggtggcaggcgtcagtagtcccagctactcgggaggctgaggtaggagaatggcgtgaacccaggaggcggagcttgcagtgagccgagatcgcgccactgcactccagcctgggtgacagggcaagactccatctcaaaaaacaacaacaacaaaaaagatagctaatgacagtattcaaaattaacttcacattaaataatgtacacaatgtaaaagccccgtagtattaaaagagaagtctctgtgtttctgtttcctaacccttttctgaaataatgaaaatcagtaatctgctttaccccttctttctcctctagtcctgcttcctagaagtaaacattctcaactcttcaagctatttttcctgaaattataatatgcttttattcctttttgataaattttttactgactttatatagtatggtaggtaaaattttagctttttaaaaccgaaatcccctcttcttcctccttcaacttctccctctttacctcctctcaaatttgaaatcctacttgatggttacattactctgtctatctaaaggttatttactcctgaaataatacattataatgatattttctttcttgtacaactctatcaccagaaattaataataaactttttcatttgcttagtttttttagttatgaaaaattgaaaaatatcggctgggcatggtggctcacacctgtaatcccagcattttgggaggctgaggcgggcagatcacaaggtcaggagattgagaccatcctggctaacacggtgaaaccccatctctactaaaaaaaaaatacaaaaaattagctgggcatggtggcgggcacctgtagtcccagttactcgggaggctgaagcaggagaatgtcgtgaacccaggaggtggagcttgcagtgagccgagatcacgccactgcactccagcctgagcaatagagtgagactcagtctcaaaaaaaaaaaaagaaaagaaaaaagaaaaatatcaaacatacttaggagagaacataaaaaaactcccacatatacccataagctagattttataattactaacatttcatcatagtggatttatcaattttttttttcactaaagtattttaggccaggtgtggtggctcactcctataataccagcactatgggaagctgaggtgggtggacgatttgaggtcaggagtttgagaccagcctggccaacatggtgaaaactctgtctctaccaaaaatacaaaaattagccaggcaacgtggtgcacgcctgtaattccagctactcaggaggctgaggcaggagaatcacttgaacctgggaagcggaagttgcagtgagccgagattgcgccactgcactccagtctcaaaaaaaaaaaaaaaaaaaaagttaaagcaagtgcaagtgtaagacattattgacatttcatctctaaatacttttttgttcttttgagacagggtctcactctgtcgcctagattggagtgtactggcacaatctcagctcatggcaaccttcacctctgaggctcaagtgatcctccttcctcagcctcccaagcagctgggactacaggtgcatgccaccacacctagcaaatatatatgtatattttttgtagagacaagatttctccatgttgcccagggtagtttcttgaattcctgagatcaaacgatccgcccacctcagcctcctaaaatgctgggattatgggcgtgagcctagcttcccctaaatacttaattatccatttctaaataataattctttatataaccataataccaccatcataacattaaaaatagtggtttaatataatatgaaacccaattcctattcaaatttccccaattgtccctgtcttttttaattggtttattaaaatcagaattaagtctcttttaaccttcaactgctttctctcccctacacacattttttaatgtctttgacttactgaagagaccaggtcagttgtcctgtacaatgtcccacattctagatttttttttttttttaaagagatggggtcttgctctgtcacccaggctggagtgcagtggcatgatcacagctcattgcagtctcaacctcctgggctcaagtggtccttccatctcagcctcccaagtagctacgattacaggcacatgtcaccatccctggctaatttttaatttttttttgtagagacaacatcttgccatgtttcctaggccagtcttgaactcctggactcatgcaatcctcctccctcagcctcccaaagtgttgggattacaggcatgagccactgtgcccaggccccacattctagattttatcatcttgtctattcgtggtttcacttaatttgttcctctatcctctacatttcttatagattggaaattagagctaaaagcttgattatattcagggtttgaggtcttcattaatgtcttgtgatctttcttttgttacttgtggatcatttgaaaactgtgcatcatttgaaaactgtgtgcatgagccacacttattgattactggacttaaataaggtgaccagaaatgagctggcctttgtcagtatccataggtcttttttctagggccatttagtttctccaaagatgaatgttccagtctcccagctgagggtatattcttggctgctgaagttaataccagaacacaggaaggaggctggtgttcccactattcaatatgtaggcttccactagtatcgtattttcaactccatgtctcactcactccctactatatctggtctcctgagcctcaacattctatatttgcagttgtctcttgagggttgtggtggaggtctgtgggataaaggagtggtcacctagttttgtaggacggaagaaggtacctagagtctgattactctgtaaatagatgttcaactaatcatccttgttttctgacccaggtctcattcatacttcccatggcacctgttgcctttgagctctaggcctttctggggttttgtgtggcaaagtggcttgcttcttattgacatgctccttgtcaagaccttaggttataacacagttcattcagctaaagaagttactactcttcaatctgctttctctttatcataatatacactgatctctcacatttgctttagtttgctggttgttaaatcttttgtccttgtaggtttatgcctctttttattcctttaatattattttcatggtattttgaaagggaaaatagacatatgaaggcaagatgctgtgtttaattaagtagaggctatcaattctgctggtgatatttaaatagtacccttaatcaggacaaaaggaaagaagatgagaaactaatatttattgtctattatatgccagacactagttcaccaaaaccttgaatgatagatatcatcaccattttcctaataaggattctgaaactgagaaaaattaagtcacatgttaatacttatataaccagtaaatgaagaagcagctttgtattcaaacctgggtctttctagaccctaaatgtgtcacaaggatcattaaagtcatcttttttcaccaaagtgcagctagatgagaaatgcagaatcaaaggaatattatctactccttcatgctcagaacaatgctggtgaaacacatacctttttcaatccattgctcaaaatcaactggctctttagacgtgcttttttcaatcttcaaggtctgtactaacattgtaaacaaagtaagtaaagtgttaatctggctgtatgtttttgtccctatatttctttttccctctgcctgagattatcatgcacagtggaactacacagagcactgggatcagaaacaacatggaagttactctgtatgtttccaaaaaaccctatggtaaaatatagtcttgtgtaactaatcttccaaatgttcgcaaccatacaacacagagcaagtagagcttttctgaatttggcattgttccgatttttttgtgtgtatggcgataatactactattggtggtcttggtcataaacatttatggagagcctatgatgagtcaaacatatttatccattcacttttgactacaatcttatgagaaaggtactttaacccactttactggtgagaaaacaggtttagaggagccaagcaaggtgttcaatgatatacagctcataagtgccagaaatggaattcaaactttaggtatgactctagaacctccacgattaatgagagaagagacttatcaggaatacagtcatcttccttctaaactggtttttctccactgctccagtccagtctctaccactccagatccattcctcctcttctttgtcctgttctgtgccatgaggggctaacctctgtggactctatcacctggattcatttacccactggcttctgattggattggatttggccagtgggagacaccagggggagactggggtggggaagggagatcagccaattttatctccactccctccctgcttcagtgtgacatctttgacagtttctcctgcctacagctcctattaggcccttttacacaggcttcagctctcacagatctctgataacactatttccttccctgtgccagggctagttacagcttcctgctatagctagtttctgagggcctcatcattccttgccttgtttgttcccttaacccaggccataattttgcaagtagccccatcaatagagcctcttcatttgaaccatctgggatgtattctgtttcccgccatgattttgtctgatacattttatctttaaataaataggattagaatgatgtcccaagggagattatccccctaaattcctgagaaaatgccactagtaatagaagaatctcaactatccaatgtaaataatcagagttatcagattttcaacaagaatttgacaaataactccaggacaaatgaatctagaataaagatgtcatggaatagtgttctagcaagctggagtcttatgttcctaatagggccttttgccaaagacttttacatagtaaattgcatggaaattattatgtgctttggaagggtttcgaatttgcagtttgagagaggccaactgagctcaaggcatttacctcataatccccatcctttcaccccagcaataaaactggattccatgctataaagaaaaactagtgttttgccaaaagtttacatatatgccttctgcctgtggaaaaaatgaaaggataatgaaaactaaaatattagccttacctggagcaccaaaaaaaaaaaaaaaaaattaatgtaagatttgcttaccaaagtaactttggattacaagcctttcaatccttacatgtttgtggaaacaaataatgaattcctggggaaacattcctgtggtggtccaaaacgtttctggattcctattgttaattttaaagaaaaaataagaatagccaaatataaatggttaatcataaaattttattgaatacctgttttttaaaattaaatgactactggattctcacatctcctttctgttaattctgcctctaatctctctccaactttaataattcttctttactactaccaggtattcttttctaaaacacagaaacggaattgatgtcacttctatctaaatgcctcagtggtccctttattgcctataattctaaactccttcgtatggcatttaagactgtaggatctggttccaccattaagttatagtctcttccatcactgtggtcacactgggccacttaaaattctgcaaatatgttaggcaggctcttgcttctgtaccttagttcattcatgaggttttttttttacctgaaaaaccgttcttccccttgcataagttcattcactttctggtcccatttatctaaccccaccaaatcagaatcacttcctccctcttttgcacttatctcatactcagcctccatctctacattggcacttaatctcctgtgtttctatggctcccactagatgctgagctctgagtccagtttctttctcttactcacctttgtaaccctacaactgctacaatggctcacccatagtagacacatgctaaatgtttgttcaaacaaaaattaaaacatgcactcaattttaagtcatatataggcaaaatagtatatattatggttttgactacagaaataatcatttctattttaactatataagcttttctttttttggaagtaaaatttacctacagtggaatttaccttaagggcataacttagtgagttttgataaatgtatacgcttatgtaaccaatactccaatgaaaatacagaacatttccgtgactccagaatttcccttatctttccttccagacaatccctacctcccttaggcaaccagtgctctgatttctatcaccaccaactatgctacaatgtttccattcgtgattttgtttgatatttttgttgggtattttaattgcttgcagctttttactattaggaacaaagctgctctaagtattcttgtacaagtgcttgtgaacatgttttcatttctctgggtaattactaagagtggaattgctgggacatagggtaaaagtatatttaactttataagaaactgtcagctttccaaagtggttgtactattttgcgctccattttctttcttgtcatgtctttgtcaggctttgctatcaggataatgttgttctcataaaacaatttgggaaatgtttccttctctatttttgagaaagtttgtggaagactggtatttcttccctaaatatttgaccgaatttaatttccataatagatatgaggctgtccagaatttccaattgatcttgtgttatttttataggtcgagctttacaagaaatctgtccatttcatctaagttgtcaaatgtattagcttaaatttgttctttatatatgattcctttagaatctgtagtgatattactttcattcctggttctaataaattgcattttctttatttcttggctaatcttgttagaggtttataacttttattaatccttacaaataatcaactttaggctttattattttttctaataattgtctattttgttgatttctgctctcacctttactatttattttcttctatttactttgggtttaatttgctcatttttttctagcttcctaaggtgaaaatttagattattggttttacatttttttcctttttaacataagtatatatgctattactttcccttgagacactgctttagctgcatcctacaaatttggtatgttacattttcaacgtcattctgttagaaatactttctaaggccaggcatggtggctcactcctgtaatcccagcactctgggaggctaaggagggtgctcacctgaggtcagcagttcaagaccagcccgaccaacatggtgaaaccccgtctctactaaaaacacaaaaatcagccaggtgtggtggcacatgccggtagtctcagctacttgggaggctgaggcccaggaggcagaagttgccatgagctgagattgcaccactgcactccagcctggatgacagagggaaactccatctcaaaaaaaaaaaaaagaaagattttctaagatcccttctgatttcttttttgacccatgggttatttagaagtgcagtgtttaatttctaagttttggggggttttctgaatatctttttgttgtttatttctaatttaattacacagtggtcagagaacatactatctaagattttaatcttgaaatatattgagacttattttatgtttcagcacatttcagtgaatgttcaatatgctgggttttaagagacagagtctcgctctgtcacccagactgcagtgcagtggcacaatcttggctcactgcagcattgacgtcctgggctcaagccatcctcatgcctcagctccaaaaggagctgggactacaggtacacgccaccatgactggctaatttttgtgttttttcgtagagatggggttttgtcatgttgtccaggctggtctcacactcctgagctcgggcaatccgcctgccatggcctcccaaagtgctgggattacaggcgtgagccaccatacacaacccatcaatacattcttgttccatgttgttgattatagtgttctataaccgtcaacaaagtcaaggttatgacattattcagatcatctatgtctttattgattttctgccaaattgttctatcattactgagaaaagggtattaaaatctctaactataactgtgaatttgtctatttctccctttcatctgtcagattttgctttatgtagtttaaagaactattattaggtccatatacacttaggattatcctctcttcctttttctcttttttttttttttttttgaggcggagtctcactctgtcgcccaggctggagcgcagtgcacaatcttggctcactgcaagctccgcctcccgggttcatgccattctcctgcctcagcctcccgagtaactgggactacaggcatgcgccaccacgcctggctaattttttttatttttagtagatacggggtttcaccatgttagccaggatggtctcgatctcctgacctcgtgatccgcccgcctcggcctcccaaagtgctgggattgcaggcgtgagccaccgcacccagctatcctctcttcctaatgaacggactctctaacactataacgtgtcccctttgtctctggtaatactccttgtcttatatttttgtctgacatgaatataactacagcgactttcttatgtaaactgtttgtaggatgcatcttctttcatccttttattttcaactattcatatctttatatttaaagtgcatatcttttagacaatatatatttgggtcttggatttttatccagtctgacaatctgatatttaactggagtgtttagcctcactgatatttagtgtaactactgatatggttgggtataagtctaccatcctgctattcatttttgtctctccctcctattcttgtcctgtttcttctctcctgtttctgagtgaataatttttttaaaattccatttaattcctctatttttttttagctatacctcctttattagaaatttttgaaatagctgctctctaggttacaacataaaaacctcatgatagtcaatttacactgaacatcacttttgtgccattgttgtcatatattttacatatataatatatcccataatacagtttttttcattaagtggtcagttatctttcaaaaaaattaaaagaggaaaaaaaggcagtcttttatatttacccaaatatttatcatttccagtacacttaatttcttcttataggtttgattttccatctaatattatacctcttcaacctgcaggatttcctttagcattccttatgatgcaggtctacttgtgatgaaaaatgcctttatcctatcttcatttttggaagatagtttagctagacacagaattctgggttgacagggtttttaaatatttgcttgtttctcccttccccagtatttaaaagatattgctccattgttgtctggcttccactgtttgtgatgtaaagtcagctgtcattagcactattgttcctctgtatataatagtttttatttccttctagctattttaaatatttttttcctttttcagcagtttgactaagatacaatgtctgtatttatctagcttggggcttgctgagttttttgggtctataagttggtattttaaaataaaattgggaaaaattcagctcaaaagtagaaacaacccagatgtccatcaactgatgaatgcgtaaataaaatgtgctatatccatacaatgaaatcttgacaataaataagaatgaagtactgatatgtgctacaacatggattaaccctgagaacatgtaagtgaaagaaaccaggccaggtgtgttagcacatgcctgtaatccaagcactctgggaggccaaggcaggtaggttgcttgaggtcaggagttcaagaccagcacagccaacatggtaaaaccctgtctctactaaaaatacagaaatgagccaggtgtagtggtgcacacctgtagtcatagctacttgggaggctgggacatgagaatcacttgaactcagcaggcagaggttgcagtgagctgagactgcaccactgcattccagcttggatgacagagcaagactctgtctcaaaaaaacaaaaaacgaaagaaagaaaccagtcacggctgggggttgtggcttacgcctgtaatcccagcactttgggaggctgatgcaggtggatcatgaggtcaagagatcaagaccatcctggccaacatggtgaaactccgtctatactaaaaatacaaaaattagacggatgtggtggggcctgccttaatcccagctactcgggaggctgaggcaggagaatcgcttgaacccaggaggcagagactgcagtgagacaagattgcgccactgcactccgacactgtttcaaaagaaaccagtcacaaaagaccacatgtgtatggttctatttatatgaaatgtctcaatagataaaatctacagaaacaaagtagattaatgcttgcctagggctagtatggatgggaaaatacagggtgactgataacaagtgtggggtttcttgtgtggggtttctttttgggatgatgaaaacgttctaaaattgattgtggagatggctatgtaactctgtgaataggctggaagccactgaattgtatattctaaatgggcgaattgtatggtatgtgaataatatgtcaataaagttgttacccacccccaaaaaaaggccagaactactttttttttttttttaagagacagggtcttgctctctcactcaggctggagtacagtggcacaaacttctgggctcaagtgatcctcctgccttggcttcccaaagtgctgggattataggtgtgaaccaccttgcccagccaaggccagctctcctaactcaaaattctgggtttttataaaatgcttaatattttacaatctcctttcatatttatattattttaaattttacttattgaaattcattaattttaattgcctcatgtttttctttggatgctttcaatgaacataaccaatagaataacataaaatatcacctgaattttaaaatgacatctaactaggccgggcgcggtggctcatgcctgtaatcccagcactttgggaggctgaggcgggctgattatgaggccaggagtttgaaaccagcctggccaatatggtgaaaccctgtctcttaaaaaaaaaaaagaaaccctgtctctactagaaatacaaaaaattagctaggcctggtggcgtgcatctgtaatcccagctactcggaaggctgaggcagaagaatcacttgaacctgggaggcagaggttgcagtaagccgaaatcgtgccactgcactccagcctaggcaatagaacaagattccatctcaaaaaaacaaaaattagtcggacatggtggtgcatgcctgtagtcccagctactcaggaggctgaggcaggagaatcgcttgaacccaggaggcagaggttgcagtgagccgagattgtgccactgcactccagcctgggtgacagagtgagaccttgtctcaaaaaaaataaaaaagacatctaactaaatcttgtaattatgtataaggaagtcatcaaagtggtagttttcttttaaatacgaatttatagctaacacctattttacatggattatctcatgtgatttttttctcaattctgaggtcagcaggaaaggtggtattatccccatttttcagatcagtaactgaggctcaaagagtaatatatgtactctttgaccaagataacacataattcacttacccaggaattttaattctaaatatagtattcttctacactacaccaaaaggactgattttctctcttcttttttactttgcttttttttttcctagtgtagaacttcttttcccctttttcattgacacattaaacacaaacggcagaggaaaagtagaagtataatcattttctttttttagagatgcggtcttgctatgttgcccaggctagtctcaaactcctgacctcaagctatcctcctgcctcagccactatgcccagctatttatttaactcttatttctgaaggaatggagagtttggaacagggccataaaacaatattccattatcctgtagggacacatttatagcactgttttctccaaatactcctatggttactctatttagataaagcaactgtgaacagaaaataacttttggtttttctttgagacagagtctcgctctgtcacccaggctggagtgcagtggcatgatctcagctcactgaacttccacctcctgggttcaagcgattctcgtgcctcagcctcccgaggagctgggactataggtgcacgccaccacaactgactaattttttggtatttttaatagagacagagttttgccaagttggccaggctggtcttgaacttctgacctcaactgatctgcccgcctcagcctcccgaaatgctgggattaagacatgagccaccgcgcctggccagaaattaacttttagtgtctacaatatacagtctaattatattttctggaactgcatatggattaaaagtccccgatgtattctgttcagttatcaggacagtaattacattattccatgttttcccgtactaacagtttttgtctaatctaaaaaatattatgtctttattcatcaagatggacagagcctaaaatattaactgtgatatataatagctaatcttaatgttctataaacatatgaacatactcgcttgagagaaagatcaccaaagtagtgcagggtaaattgatcttgccttagaaaacgaatctatctccaatcagaatcaaggagtgtttctggaaagtcctctatttctggcaaacaacttaaggcaaatctcctcagttctgtgtatccttaaagcagttgccacattaatttttctactccaagacagagtaggatagtaactattacctgaatttcaggaagtaaacaactaagaagaagaaagaagggacacaggcaaaaagtggatattgaattttttattcaaactaaatttgagttaacctagtgtagcacaaagatccctgaagtacaagttagaagacacgagtgtcagttgattctgcctcttgcttatctgtgtaattttgagcaagtcatttttattttgagcaagtcatctgatcattcttttcttcatctttacaacggggttgaaaatacttttttgtgcttcttattccccaagattactgtgagggtcaactgacaaagtatctatgaaattataaagccctatgcaaatgtacagttatatatacatatatatgtgtttatatgtatgtgtgtatgtgtgtagactttgattactttccagtattagtcaagtttgactcatagaaatagtctctgacttacaggaattcacagttgagagagggaacaaacattaaaaataaacactacaataaaggaaaaagtaaggtaacagaggtatataccaaatgttattggagcccagcaaagagataaacgaatctgaggagaaaagtcagttgccataaagatgacaactacgcttcaaggaagaggctgagttgctagaatttcatccagatacatgggcttcaagatatgcaaagaatcataaaacctctgttacaaccagttctgccttcaatgattaaaagtagtacttaacctctttagacctctcttaccacaagtctaaaataaagggttttggcaaaataaacccataagtcccgccagtcctacaattagatgattctatgagtcaaactctgttcattgtacatataccaagaaagagggttcaagaaagtagtaagccagaactattaaaaaaggagtcctccaccaggcagggggctcacgcctgtaatctcagcattttgagaggccaaggcgggcgaatcacctgaggtcgggagttcgaaaccagcctgaccaacatggagaaaccccgtctctactaaaaatacaaaattagccaggcgtggtggcgcatgcctgtaatcccagctactcgggaggctgaggcaggagaatcgcttgaacctgggaggcagaggttttggtgagccgagatcgtgccattgcactccagcctgggcaacaagagcgaaactccgtctcaaaaaaaaaaaaaaaaaaaaaaaaaagagttctcaggctgggctcagtagcttacgcctgtaatcccagcactttggaaggctaaggtgcgcggatcacaaggtcaggagtttgagaccagcttggccaatacggtgaaatcccatctctactaaaaaatacaaaaattagccaggtgtggtagtgcacgcctgtagtcccagctactcaagaggctgaggcaggagaatcacttgaacctgggagttggaggttgcagtgagccaagatggtgccactggactctggcctgggtgacagagtgagactctgtctcaaaaaaaaaaaaaaaaaaggagtcctcccattcccattaactgctttttcttggaatctgaagtctaagaacaatatttagaaaaatatctagctagaaaaagctctagcacaatgaagagtagaaattggaaggatatcaaaaaggggagaagcaaaacaatacacgatagcaaggaatgaagcattcagttctgcaaagatatcacttagaccagtaaggaaataggtagtaaataggaagttataatatttacattcttattccaagaaaaacggagtaaaaccataaccagaccttaaaatttacacttccataaaatgaagttgtttgagtttttgccttggtaaaccacttctaaaaaaacctatttgtatcaagagttcagtttaggcattataaagaaaaggatcaaaaacctaaatatacacaactcaattagtttcagaaatggtaccaaaagtggatatcaggtaatccaccaaacatttattaaactatgtttaatagggcaagttgttataaaacacagtccaagtactcaagggattcaccgatttaagactgtaaacaacaaagtatagtaactcttacccatcaatgatattttcaggtgggtgtttttcatcacttgatgtagctaaaatcacttcggacccttcagagctcagacagagatcaatttttctcatcttaaagtgtttaacctgcaaattaaaaaataacaaaaaaagcaacttcttgattctctaaactttatctgagaaaacgaagtgagaaggaaaggctgttgcctagcagatggtttaacacccaagctattcaacatgtgggagggactctaacatgtttgtttaggtaagaaacctctcccagggataatctataagacatgactatttctgctactctgcttcacaaaataagtccctgactaccctagccaaacaaaaaaacaaaaacacagaggtacaggaagaaggtcaaccgaggagaacaacatggaataccataaaaatactcgattaatttgaaagaaggcagaaaaagagaaacaaaagaataaagaaaaatgggacaaatagaaaacaaatagcaagaacacagatttaagcaaaaatacatcaattattccattgagtgttaataaacattcaattattaaattaaaaaaacaactaaatactgttttccagagatacattctaaatataaagatacagactaaaagcaaaatgacagaataaggtataaagtcttaatgtctggcaaggtaaatttccctacttttcttaaaatttttaaaaattttcattattttatgttttagttttttagaaatagggtctcactctgacaccaaggctggagtgcagtggagcaatcatggctcactgcagccctgaactccagggctcaagtgatcctcccaccttagcctcccaagtagctgagactacaggtatgccactatgcccagctaatttttaaaaaaattctctgtagaggccaggtgtggtggcttatgcatgtaatcccagaactttgggaggccaaaaaaaaatttttttttttctgtagagatggggtcttgctatgctgcacaggctatcttttttttgagatggagtctcagtcttgttgcccaggctggagtgcaatggggcgatcttggctcactgcaacctctgccttccggtttcaagcaattctcctgcctcagcctcctgaatagctgggattacaggcaacagccaccacgcccagctaatttttgtatttttagtagagacggggtttcaccatgttggcctggctggtctcaaactcctgaccttgtgatccacccacctcagcctcccaaagtgctgggattacaggtgtgagccaccgcgcccggcttgcacaggctagtcttaaaactcctggcctcaagtgatcctcctgcctcagcctttcaaagtgctgggattaaaggcatgcaccactgtgcccggccaatatcaatattttataaaaatgcatttcttcttagtttttgtttattagcataaagttcactttctattatattttaaaaactagtattgatagtattaaaagtgtggtaacattggtaagaaataaaaacatatattttaattttttgtgccttttttctctaccaatcttaccacagttttcgacactattgataccagagaaccagtcagtgtgggatgaacattgtcaagccttagttttaagaggagaaagatggtgaattctgtaaatacagattgataaacttgaatgctaattctcgacaaaatcctaaaattattaaatttcattattaaaatggtaaccttgaaaatgtaaccaaggaagtactaaaattggaagtagcagtaacattagtttacaagctataccaaacctatatatttcggtttgtctgatggaattcctacccatctggaacatgttctaaagatttcaacaaagcttcagacaaagcttctcaagataccctgtggacccgacagagaaatatgaattgggtgatagctagtactctaggtagatatttctaactctgagtggctatactcaaagaatgatgattaatggaagaaaatgaacttgtggaggacttctatccttatcctactcaacatttttattaattaaggatgcacaaagtatgcttatcaattttgcagacacaaagctgggatgtcagctgatatgctaggtgacagaattagcattcaaaaagaaatgagcaagctagaaagacgacttgcaatgagtaagatatttaataaggataaaagtaaaaacctatactcagttttgaaaaaaatccatcatacaagggttggtctaaatcaggggttagcaaactactgcctgtgagccatatctagcctgccatctgtttttgtatggcccacaagctaaaaatgcgtttaacattttaaaatatttttaaaaatcaaaatattctgtgacacacaaaaattacatgaaactcagattttaacgtccatgaattatattggaaagtggctatgctcattcacttatatattgcctatggctgattatatgttacagtgacatagctgagtcactgtgaaagaccataaggcccataaaacctgaaatatttactatttggccctttacaaaaaagtttgccaacctctgatctgataaaacatataggtttggttgaccacaaagtcaatataaggtaacagtgtactctatctgcccctaaaggtaatggaatgctatcttagagttaaggaagtaccacattccatcaacatttttgaacaccaattgaacaaagggccaaccactgtgctagtagtgcaaagatgaataaaacaacctaagtgactaagacttggttcttgccttcaagctcagagtcaaggaagatgaataagcatgaaactaacagtacaatatgctatgtgctaacatcatgtgacgcacatccagaatactgtgttcagttctgggtactacgttttaagtaggacattgtcaggcgtgatattgttcggaggagagtaaaaagttcatgatgatctataaaccatattacatagaaaaaggtgaaaaatagaaatgcgactataatttttactctcagtggtgctcacaaatggaaaaaggatttaaatttctttttttttacacctcctggggcgtgaactggactcaacaaatgcacattttaagcaggaagactttggagagacaaggactttcgttcaaagtaaagattttaaatttctttcatccctgaaaacgtccaagaaaagtcggtaagagatcataatctatggaagaaggcaaagaaatctacgaaggaagccaaagaaaggattcctgcattggtagttctcttaggctgagtcagattttaggaaaggtagattgggaatagataatgaaagatctgaaaagccaggttaatggcaatgaactttatcctgtactccagtggttctcaactggactgggtgtagattttggcctccaagggacacttcaaaacatctgaagttttaactgtcacaacttgggagggaacgctgctaaatataccatcatatacgggacagcacatcctcaagtaattattggtcccaagtataaatagtgtaaagctggggaaactatgcagtaatctatttggcggtggaaatgtgagggttggagatgtagggagagaactttttttttttgaggcaaggtctgggctctatggcccaggctggagtgcaatgactcgatctcggctaactgcaacgtctgcctcccgggctcaagcgatcctcccacctcagccttcctagtagctgggactacaggcatgcaccaccacggccggctaatttttttgttttgtagagatggggttttgccatgttgcccagtctggtctctaactcgtgagctcaagcgatccgcctgccttggccacctaaagtgctgggattacagaagctagtcactgtgtccggcggataacttgttttttaaaagagagttacactttagggttgatatggagcagatgaataggaaagaatgtactctccaaatgttcagttcttttcttacctcacattcttaagttttctgagagaagcaaacacatgctttaatacaaaactcatttcacaccttctatattcaccattacccttcctatttcctgttttgggtagaattacttaagtagaaacggcagagacttggttttctttaaggttctttgttgcagttaatgagaagaggcaaccaaccttagagaaatccatacaatgccaggcctggtgactcgcctgtaatcctgacactttggaaggccgaggtgggcgaacagcttgagctcacaagttcaagaccagcctgggcaacatggtgaaaccccaaaaccctctctactaaaaattcaaaaattagccggacctggtggcaggcgcctgtaatcccagcactttgggaggcccaggcaggcggatcacttgaggccagcggttcaagaccagcctgaccaacatggtgaaacctcgtctctactaaaaatataaaaattagctgggtgtggtggcaggtgcctgtaatcccagctactccggaggctgaggcaggagaagctcctgaacccaggaagcggaggctcagtgaggcgagaccgcgccactgcactccagcgtgggcgacgagcgattatgtctccaaaaaacaaaacaaagtgcaggtttgggaggtagtctaatcccccacccctttagagcaaggcaatttcctcagggccgcagtttaccaaaggtggtacactctggggtgctatcctttccattttttacaatccctgaccctggtattccctgatgccttatcctgtcttctaaaccagtgccactggtttcgtccccagttcaccctttcatcgctagctcacatgccctttgtggtccttctttccccaaacctcttcaggtcaagtccttagaggaccttctccctgaccagctcccttggttctggtgctacagctggactcctcacgctctttcttcaagcatcatccattgggaacgtggtgtactttagaaaacacggacccggcctaaggcttctgtctccgaggggccagggccacggcttccaaggcaaaccagccctggcaccaccttctcacctccatcccaaaccctcctcctcagttcaaggccctaaagcctcagacttgtggaggcccgccccaaattatgtaaagaatatataaatgcccccgaccttaggtacaatttatagctagatgtgttacgttgcggctgacagcttacattacattttggtagactaattaatttcgatttacaactggttttcccttttggggggtcaagacgctatttctggcctcaaagagtttcgtgggctggtagtggcgcttccagggtctagaggaaaaggcgggcccgcgtcagacctcccgccgcggcccttccacgcctcccgccgcgcgtctcttcaccacccctccactgttgctcccttcccaccaacatccccgtccttctgccttgcccggccaggcccccataccctctggtgccagcctgcctaccccgctacccgctcacctgggactcccgttagctctgggcgccggaccttccgggctcgaaacctcccttgcgccccgccccacgcagagcgtcccgacccgcagctccgcctgctcgccgcggcctccgtggagtccggggtcgcgcgcgctccaactctgaaatcttcgcgccacgcctcccacaagccccgtcccaccctcagccccgccccttcgccgcggccaccgctgagtttccgggcgcgcgctcctaccccgagctctttgcgccacgactcccacaggccccgccctgccctcagccccgccccaccccgccaccgcggcctccaccgagttcccgggcgcgctcgctccaccgagttcccgggcgcgctcgctcctaccccgagcttttcgcgccacgcctcccagaggccccaccccgcctcagccccgccccctcgcggcggcctcggcccctcctacccctagctcttagcgccacgcctcccacaggccccgcccacaatcggccccgccctctccggctcccattacttcgcgggccaagatgcgaaaccactcctgtgcgcctttccccaggccagtcccggggcgcgcgctgcctaccctcccccagctcagctctatccccggggcccgcaggacccaggggacccaccctcccgcgagcacgcacgcgcagggcccacctctgcgagttccaaaccctcggccctcgggtcgcctgccctgggcctggccccgcctccaggtccggccccgccttcgtgccggggcccgcgcacgcgcgcctccccggcccagccttgctcccgcccccgccggtcccgcggtcccacggcgcctggttgcccccagccccctccctcctcccaccttcactgtgtcccacccttcctagctttgtgcccggggtgctgagcccttccccgtcagccgggccgcgggaggagggagccgtcaccgaggagctgccgctcgctgccccgggcaggggcacaggtaggtggcggccgcgggccgggccgctcgcggggccccgggttgcgtgtgggagcgggggcggggtgttagggaggggcggggtgggggaggggacgccccagagggacggcggggcgcgggttgaggggaggatgaggtatactggtgggggcgatgggtttaagggtggcgtaggggtgcgggggcaggctatggggacgtgtgagaattggggttcggggcctgggtgggacagggagcaggattagcctgggtggactcggggagaggcatgcttggggagagagcgggaagaaggaagggggaagggaatgggattttaggggttcaaggaggaaacgagataggataggaatagagagggtggggtcttgggggcagggaagaaaagttgggggtgtggaatgccaagttggggatagtgaggcgtgaaggaagagggtcttgaagattgagaacagaaggcaaggaaagggatggagagattggggtcctaggagagggaagcccctagagtgggaagaagggaagaatagatggtgaaggagaggagtggggggtggaggagtgtggggaaggaaggggaggcaggtgaaggttgggagatcggaggttggaaggttgggtctgtgggacagcaagccacctttcaccaggggctcggaagggctggaagggtctgaaggttgaaaggggcaggagagctggggtgggcgaagggagtggggttaggatttttggtgtgagaagcgctagaattggtaagagtgtcacgttgtgggagagactggcatgttcttggagggaagtagggagcctgaaagggtatgggtgagaaggcaggtaggaaagtgcatattataggaaaaaagtagtgaggaaagttgaaaattgaagaatggggacacacagaacaatgaaggtggattgttggttattggtggtttagaactacccatagtttagtttctgtttaggtttttatgttagaaattttcccaagaatactgcattttcagataaaccaaaagtgtctgcagccttgggatgaaggccatgggttggcagatgttctcctggtatatggatgtagctcattttgggcctggctgagggaagaagggaggcctcgttgtaaatgtcctggctgtgttcccactagctctttccccagatgtgcactgtttttttgtttgcttttgttttttaatcttatccccaccccctccccccaggcttcatccagtgaatactagagggatcgaacaggtgggtgagattaatttttcacattttttttatccttaaggttgatgtcatatttttagtcttgagaaacagcatcatgccaaggaaagagcttgagctttggagtaatgcggccctgagattgaattctggctctgccacttattagctctgttctagagtaagttattttatttccgtgggtctctttgtctattaaaaggcaatactgacctcataggatcattaaagattacatgagatcattttatatagtacctaacacagtgcttggcaactggtaggtgcttaataaatggtagccatcatccagtatcattaaacatcatagttactgctacaacttgttattcttaggggatttttatcttactttatctactgaagttagatattttcttcttcttctcttcaaattagccgtagattcagctcacaattttaccctgtgggctccctgacaatcccagtccacctgactggcatagtcatgctttttgcttgggaaactggattcaaggtctaaaaaactgtcatgtgtagttatcaataattttgtctggcctttttcaagaaagctgtatagaactgagtttttaatgtaatacagctgtgtttcattcatttgatgaaatggtacacttcgtggtaactttggctcgcttgtggtgaccaaatgctagaacatacatgattgtaatatttttctatgctgtcgtatgggttacaaagctgccttcctgtagcaggctgggaaactatcaaaatgtcgctgttactcttgatccaatatataatacagctactacgatctacattgggcattgttattgttgtagtgactaagtattttaatttttcaatttggatggagttttcaccatggtttagaacaggccctgtctcctgaccaggtccatttgtaatacaccacccagtacaatagtgagggacaaatgaacccaagtagtgaagttttgtgtagaattctcttgcctttctggttcttagccttgaagggttcaaatgttaatttaatgcttaggtcatgttacatacctcatagactcaggaagatcctttttgggagaatgcaggatgtgctgatttagtagtagaaattaaaggacgccaggattcccaaaccaaagtcaattcctccagtggcttctggacaaatgatgtgggtttactctccaggaaaaaattgtatttattttttcctcatttagaaagataagtggtatttggtgggtaatctaaagaaaaacaaacaaacaaaaaaacaaccagaactgtgccttttttttgaaaatgatccctggaagccaaagcagccaggattttgaggagcccaggttagggtccttactctagccccaagctgcttgtgccctctgctggatggaatcagacttctagttttcatctgaagtggtcacccacccaccccatccatccatccatttgtccattttacaacagtgtttgtggaaggcactgttaggggtgagggttgggggcaatacagatgggcagaccctgtgtcattgctcagggagttcacagtgtattcatccactataatagggtatgttccatagaatttgtctttctgttgttaaaatcacgtcagtcctttttagggccatacctagcgtctgctttctgatctacaagtagagtggagctctgaatgttaaatgacagggataaagaccaaaggacatctgccgtaattcctcagtcaaaattaaggtctgcaaggttggagggtccagatgctcacccctactggaggaacagctcagaataaatgaggtgtctccttagcagcaggggctgtaaatgctggcaagagaaaagtatgggttataagagctggcactgtgacaggatttttttcccctgttttttagtttagttgtctcccaccccttgtagtaccagtagcaatatattcccatcgtctgctttgcctctgccacctgcagaagggtctggcaagtgggggaggagcctgcagctgttgcctggaaaaggagctggctcctagcaacagtatcagcaggccctacaactgagagcaccaagtttgtcctttgaggtcttacccttcctttcatacagttcagcaaatatcttttgagggcttacttagtactaggcactatgtcaagcctgagaaagatagatgaatcaaataagtaccttgccttcaaaaagctcaccactctgggtacattaacaagtgaacagacatagtacatggtcctaagtgctatgtaggagagactgggtgctctgggaaaaccagacaggcacgtactggtgcaggggttagggaaggtttcccagaagagggacgaagttaatgatgagtaggaattagctaggtcaggtaggcagagaaggatgttccagccaaagggaacagaacgagcaatggccagtgggacatgagagcatggccagtttacctgggtagtatgacagggccaaagagtaggacataaggagatgagcaggaaagggtgaggctctagggctaggcagagtactcttctctcatgtgcttttatacacataattatccttgagagaaacatggatagtactgattcccacacacaggttcattgtttcatctccagagactcagcatttttgatcacggacctaattgtgtgctgacactcataagtgccttcagggccacattgtggccccacattgatgcagaagaagctgagttggttcactctaaaactcaatcagattattttagggatattatcaggcatgtatgatattctacctctcttctccctttaaattgtagaaataatcctcaaataccttcattttatgtaacatagcaatttttcatgtattttgaaatctcatggttactcaggaggaaaacaagtattccagttagttcttgggcatatattattacccacatgactgcagaaatgcccaactgtttgacttttttatgttaaaactgccctaatagaactttaatagatacgaagtttccaaaggctagaatagtttttatgtagctcttgtaatggaggtatttatttgtagataaaaaaaatcctgttgcttttggtctttgtaaagtttagcaaacgagtaaatgttggttccacactatctgctcggggactataagatgccaggacactgtgttatagagtctgcatgaattcagcgtggttccttttctcaaggagcccaaagcagcagatggcagactcagaaacaaataaatacaacagtgcaccgagtgcaaccaagaagtgtgtggaatgtgtcaagctagcaagggagttatttatttctagtcttttttctgtgtctaaacatgttttttaaaaattcataattttaatggctttatcacattccatggtacgtgtaagtcataatgtatttattaacatcccaattgttagacatttaggtcgttttccaattgttttgctaatataaacttgctgccattaatttacacataaatgaatctttgctgacatctgtgacaacttccttagcatgaattttgaagatgagattttgacctgggtttctgtttgtttttttttgagacggagtctcgctcttgtcacccaggctggagtgcaatgaaacaatcttggctcactgtaacctctgtctcccgggttcaagcgattctcttgcctcagcctcctgagtagctggaactacaggcacgcactaccacgctcggctaatttttgtatttttagtagagatggggtttcaccatgttggccaggctggtctcgaactcctgacctcaggtgatccgcccgcctcggcctcccaaagtgctgagattacaggcgtgagctaatgcgtccggccttgacctgggttttgaaagaagagtgggagatggccagataaacaagaaaaagggaagagtaggaaggggcattccaggtagcggcaatagaggcaaccttgaatgccaaagttcccaggcaactggtgagttttgcttttcctaaaccagccaccaggcctgcctggtaggctcataaagccctgggcacagcaagatgaagttacatgttacaaatggcattttaattggatttgcttccctgtgccttgcttttacagttgcaaccaaggcaatgtcttactacctcagctcagaaaaccacctggacccagggcccatctacatgcgagaaaatgggcagctgcacatggtcaatctggctctggatggtgtcaggagtagcctgcagaagccaaggcctttcagactgttccccaaaggcttttctgtggagctttgcatgaacagggaagacgacactgcacggaaagagaagactgatcatttcatcttcacatacacccgagaggggaatcttcggtactccgccaaatccctcttcagccttgtcctgggtttcatctccgacaatgtggatcacattgattcccttattggctttcctgagcagattgctgaaaagctgttctctgctgctgaagccagacagaaattcactgagccaggtgcagggctgagggctttacagaaattcactgaggcctatggaagtttggtgctttgctccctgtgtttgcgaaacaggtgggtgttctgattagattattcggtattttattgggtgtgttaattctgtcaagctctggggcttagtgggctcaggggcttccctcatcaaatagcacttcagtttagaacttccaaatatgaagtaaaagaccatattgaaaaaaatcactcttccttctcctcacctcttagatgacacttaactttattctgaaatcattttacaaggattagttgtcacagctcctccattaagtagaaaatattattctaacagctttcaaagagaaaatagaaaagacaaaatgtgatctgccaaatatctcttgatacgctcttacagatggggagattagtacccagagtttttgggcctgtttttggttttcagaccactagatactgaccattagataaaaagtgaccttaaaagattgggtgattaaaatttcaaatatcctaaagtttggcagttctcaaagtcccaacactaaggtctgtggtcttaacaaagcagatattttctcttgtgactgcctttgctcatatgctttatttaaaatttttactttaccgtcatgtaaaaacactttcaaaacatctaattttttaaaaaacttgcaaaaacaataaaactatacatggcaaacaatttaaacacaaacacaaagtggcataaaatgaaacataagccttcttcctatctcatctccagtttcctctctccagagaccaaatgctgttaccagtttttaaaataccattccagagatattctatacacatacatgcttatgtagttcccgtctttgttatacagatggcagcatgctgcatacactcttatggaccttgctttcttcacataatttgaaaatcatttatcatcaatacttgtagatttttttttgttttttttgagacagagtcttgctctgtcgccaggctggagtggcagtggcacgatctcagctctcactgcaacctccaactgcctggttcaagcaattcgcctgcctcagcctcccgagtagctgggattacaggcatatgccaccatgcccagctaatttttgtatttttagtagagacgggatttcaccatgttggccaggatggtgtcgatctcctgacctcatgatcctcccgcctcagcctcctaaagtgctgggattacaggcgtgagccaccacgcctggcctacttgtaggtttttaaaatagctttattgtataccactgtatgaactattctgtgattagacctgaaaggtagcttactttttttttttttgagacggaattttcctcgtttcccaggctggagtgcaatggcgcgatctcagctcactgcaacctccacctcccaggttcaggcaattctcctgactcagcctcctaagtagctgggattacaggtgcccaccaccatgcctggctaattttgtgtctttttagtagatacggggtttcaccacgttggccaggcttatctcgaactcctgacctcaggtgatccaccggcctcagcctcccaaagtgctgggattacaggcatgagcccccatgcccagccggcagcttactattaagacgcacaatctgcatgagcattataacaagggctgaacaaaaaatgtatataagagaaagccatatcagaaaacaggaggtaagctcgtatgcttaataaaggagaaatgatctttatttaatcagctcatagaattaatggtttcaccacaggccaaatactgtattttaaaaagaaaagacataaacacatgcagaaaagaatagaaacttggctcataaactgagcaggcaccttgaaagctctgtctctgggctatggtctcagtcatggctggacttgggactgctgccagtggaaaggaaaaaaattaccttgcctaaatgaaaaagtcaagcaatatttcattgtggcttatgcatttaaaatacgttttacccttcattttttcttccaagttgtttatgttcattgtagaaaagttagaacaatggcaaaatagacttatgatgtatatcttgttttaaaattagcaatacatgctatttggggaatgcataaaattgtagtattaaaaaatccataatcccaccatgatgatcattttcaaatatattatttttatacatttgggaatatatactttgtacaactcgtattctgttttttcccccacctacccttatagcttaatatttgccatgctgttgaaaacgccgtttatccatttgcgatgtctggatactgttgtagtggtagattggtcagattgggatgagaatagcacttttcattcacatttgatgaggacataaattagtgtagcatttctggaagcagtttagcaatatgtatcaagaaccttgaaaacatccatactatttgtttgacccattaattctacttactaagaatctattctgatccctaatgtaataatcaaagatgggaacagatatttttacataagagtgttcattgtagtactgtttgtacaagtgaaaatctaaaaactaaatgttcaacagtagggagttggttaagcaaattatagtatatttatatgatgaaatattatgtaactattaagataatattttaagaaacagattttttaaatgtatgtattggacagatagaaggaaaaaagaaatctaccaaaaagcggtctagatggtgggattggaattgattttatattctttatactttcctatattttcttaatttttttccaatgaaagtgatacattatcagaaaatgtaagaaacatttacatttatataataatcagaaaatataggaaactttttttttctttctgagacaaggtttcactctgttgctcaggcttgagtgcagtggcgtgatcttggctcactgcagcctccgcctcccaggttcaggtgattctcccacctcagcctcccgagtagccaggactacaggcgcccgccaccgtgcccagctaatttttgtattttttggtagagatagggtttcaccatgttgaccaggctggtttcgaactgctgacctcaagtgatccacccacctcagccttccaaagtgctgggattacaagcgtgagcgaccatgcccagccagaaaatataggaaacaattttaacataatcttttttttttttttttttgagacggagtctcgctctgtcacccaggctggagtgcagtggctcgatctcagctcactgcaagctccacctcccgggttcacgcaattctcctgcctcagcctcccgagtagctgggactacaggtgcccaccaccacgcccggctgattttttgtatttttagtagagatggggtttcaccatgttagccaggatggtctcgatctcctgaccttgtgatccacccgcctcggcctcccaaagtgctgggattacaggcgtgagccaccgcgcccggccaacataatcttttagcccatattttattgcagcaattccacacttgactgtctcattcaaatgtaagactttcagttgttatcaaaaacctctcttctccttttgaatccttaaaggcaaatagagggcaggaaacttgaggttgcatttgcaatccagggctgtagctgcagtccaagaggttttgtcagcacaaaggggttcaggtcaaaagtaatgagcttgaaaaaataaatgaaaataaaataactgggtaggtgcaggcacttgctatcttggggttaagtcacaaagctacctgccagaagcaagtgtctttgcaactgaattccaaccttacgaaaactctcttctcccttgtgttgaaaccccagtgatttttaatcccactggtggtaacagggaggcaagtatgttttccttaaaatatcactttttgttgttgacataatagtaatagctactatttcatgaggtcttgcaagatgccatggaattttaaaatattgtttctctttttcttaatcatcctgaaaagaattttgtagccccattttgtagctggagaaattgaggctcagaaaggttaagtaactgtctcacaatcacacaagtaattgggctgttagaatccaaactcaggtctggtctgtgctctttctattgcttttccactgtactgttccgaaccctttaagggaaaatttggaagactggttgcaagcaagaacctagagctttgattatgtcctagattagcacctagtaatgtctgtggcctaacatgtttgttcctcaaccttgagtttcgtaatgtttcttaatcacattacacagtgttatgtcctttgcagagaacccttgtttcagaattactaaaaatcttttggttaattgatcaaagtatatgtgttttcctttctctgattgccagtaatcctctaaatccccattaacacacttcaactctgtgattggaaggtggaaaacagcagctttatttacaatgcaattaaaatacatctgagtaaataaggctcttttgtgtacccagctgagctcggtctccaggcaccttaggttccaccctttaagggggtatcagtgcctcagaccatctgtacctagctgtcaggctggtgattagtttgagtacatctttttttggttggaagtaggaagaaaagagattaactcctctcttgccctctgattattccatcctgtttttggcagttgtgatcctgctgatggaagagaggtatgtactcttttaggtgtaaccccactgatcctaacacaccatcttgctgtggaaacttccagacattcaagaggaaggtggatgagagaggcctgctcttgccacaagtcagtttccctgtcctcttaggttcctctcctctccatttcctgtcacacctaatccctttcattttttctcactgacctcatctgagatagatgaaccactagaaagcagggtggaggccccagcctgggctgtggaatgctgttttgatctcctttccctctccagaggcttccctgatgcttcctgataacaacttggcaaggtgctgcaatgtaattaagttgctcgtgctcagggtttgtcttaatatccatctagactggagtgagtccttgtagcagtcttgctgtacatacttttggagtaaagttaggataacaggcacaggggagtgttcaggaaagataaaatgtgatgtgccaaatatctcttggtatgttcttggggacatgcagattggaaacgagagttcttgaccttgctccagttttcaaatcactggatgttgagcattagattaaaagcaactttaaaagaattagtaattaaaaattcgagtatcctaaagtttggaaattctcaggtaaggtcccaacaccaatgccaaggtctgcctgataacaaagcaggtgtttcacttgtgactttcctttgctaatatacatttatttatttatttatttatttattcaaaatttttattctaccatcacataaaaagatgttcaaggcatttactaattaaaaaattcagcctttgccctgatagtaattagtgaagtctgcttattccatagtactgtgtcctgatgggatggtaggatattgactatgatacaaatccacaaatggtaatgctttaagagtagtgaggggaagctattgattgctctccacgctccgtaggtatctcgtgatttcagaaaagcttgaggagattaagtctttccgggagctgacctgcctggatctttcctgttgcaagcttggagatgagcatgaacttctagaacatctcaccaatgaagccctgtctaggtactgacctgtcaccacttgcagatgaattgtttcagtattgttttaaaggctgatccaacaggattatcttcaggaatgctgattacttcccattcttatgttgatttgcttttttttcctaaaacattttcaatctccatttacttggtataagcaatatagattagacaacccttagaaagtcagtcagttgactcaagtcagttagttgactctttttttctaagtaacttttattttaatatgtaatacttgaagctacgtaggttaaaaagtggttttgccccttatttatttatttttatttttattttttttggagacaaaagtttcgtttttgccacccaggctggagtgcaatggcacgatctcagctcaccgcaacctccacctcccaggttcaagcaattctcctgcgtcagcctcccaagtagctgggattacaggcatgcaccaccacgcccagctaattttgtatttttagtagagacggggtttctccgtgttggtcaggctggtctcgaggtcctgacctcaggtgatcctcccgcctcagcctcccaaagtgctgggattacaggcgtcagccactgcgcctggccctatttatttatttctttagacggagtcttgctcttgttgtccaggctggagtgcagtggcgtgatcttggcccactgcaacctccacctccaggttcaagctattctcatgcctcagcctcctgatagctgggattataggcgccccccaccacgccggctaatttttgtacttttagtagagacgggggttttgccatgttggccaggttggtctcgaacttctgacctcaggtgatccacccaccttgggttttgccctttatttatccagtcctagtttattctagcaagggatgagacattataccatagtcaacaatcattatcgtttgctactttaactatcaatgagctacaattataaagaaaatgaactattaaagacagccaaagaaattcttttcaggagtcatgatttaaagaaatggcccagttcataccattcacaaatagtctgactgatctcaggttattctggccagcaaagaggaggacagatggatccctctgtggttttataaacacccagaagaacaacagcattacaaacctaggtctaacctactacctgaggcctgcttctgacagtgacacctacctactgccccataaaaagatgctgttgtgtgaggctagccagcatcaaggctcagatttcttatgtgaaaacggagcatattaatataccaattccagcttagcatcagatggattggattatgggtataccttattaacccaaactgaaaatctagattgataaagctggttaaatttagaggattgtttgctttgcaaaaataattctcataggagttctttagcagactttcctgacatagttagaatgtttttgattttcacaccatttgtcagaaaagcagcttttgttttaaagtatatttatcccctagtggaagtccatttacctcattcaacaatatacctttagtgccctctgccctctgaaattagtactgcatgacactaaattaactctcacttggtaactgaaatggcaccaaaaaatctttttttttttttttttgttaggcagggtcatgttctgtcacctaggctggagtgcagtggtgcaatcatagctcactgcagctttgaaatccttggttgaagccatcttcctgcctcagcctcccaagtagctgggaccacaggcacacagcaccttggctagctaattttttaaaatttcttgcagggatggggtctctaactcctgggcccaagtgatcctccagcctcagtcttccaaagtgctgacattacaagcatgagccaccatgcccagcccaaaagagcttaactttgttaaatgcattgggtatgaaatagcaagaggtagaggatatgttatatttttaaatgaaaatgttgaaagcatgtttttatacctagattgtctcaaactctctttgagtaatttatgtatgtactttgtttccctagtgtaactcagctccacctgaaggataattgtttatctgatgctggggtgcggaagatgacagcaccagttcgagtgatgaaaagaggccttgagaatctaacattattagacttatcatgtaagttttcttcgaaattatagattattttaatgttggaagaatggccttagagatcatgtagttcttcctcttcattttagaggtgagaaaggaaaggtgactttcctcggtgccatagaaacttggtggcagaacaggattgaggccaaagactcttgactcctggccaactgatttttctagcacataccacctctttagggtaggaaaaacccttacacattcatccatgccactcgctgtgtgcaaacagagacacctttcatcatattcattgcatacttaaaggacatttgactcatctttattttccttgagtctctgatccttggtgtctgtcagctaggtccttttttatcagtgtttgcctgatgaaaagctggatgaacggataatttactcagattaaccagatattgactccaatggtaagaggttgacagagatcatttacaatttaaccgagcatccattgactctatggcaggacagtatgatgccaaaagaatagaaagagcagtggtttgaggtctgaggacccttcttggtctaccacttttactaccagttatataccttcagaccagttatttaaccactttgagcattggttttggcctttgtaaaatgaggataataatgaatgtcctggctgggcgcggtggctcacgcctgtaatcccagcactttgggaggccgaggcgggcagatcacgaggtcaggagatcaagaccatcctggctaacacagtgaaaccccgtctctactaaaaagatacaaaaaatcagctgggcgtggtggccggcacctgtagtcccagctactcgggaggctgaggcaggagaatggcgtgaatccgggaggcggagcttgcaagtgagccaagattgcgtcactcactccagcctgggtgacagagcaagactctgtctcaaaaaaaaaaaagaaataatgaatgtcctccctacctcccagggaagtgtattcattcaacaaatattttttgagcatctacaatgtgccaggcactacgcttatggccttgaggactcaatgctaagtgtagtactctctgacgtgagaaagtaatatataagaaaggattctgaaaataatgcaagttggtaagagtggtgatagtatctgtgtctaagttcccttgaatatctttttaaaataaataaatgcttttactttggaggtgaaatggccatgaataaagtatgataaaccattgtaatacatgtttatgtatgttttcatatggttccaaattaaaccctttgggataactacctggttcatttatttttctgctcacccccaactcctagaaagtaagagctgtaaaggatctttagggatcattgagtgtggctcttttatattacaaatagtaaagatcagacctctgtatttaatttactttgaaaagtttgccaactcaaatgttttatagtttatcattgcccggacgtttttctgagcttatttttggttgtcattttaacagcatttatattgtgacagaatgctacgttgtttttgacatctaggtaaccctgagatcacagatgcaggcattggatacctcttttcttttaggaaactaaactgcttagatatctctgggacagggctcaaggtaagacttttggttccttctctcatttttctagactcaacaatttgatattttgcctgtgctaattggtatttagaaagggctggtatttatgatggtctttatttactactgaaaacaagtaagaattaaccaaatgtatttgcatttctgatctgtctctgcctcactaggacatcaaaaccgtcaagcacaagctccagacccacataggccttgttcactccaaagtgcctttgaaggaatttgatcatagtaactgcaagacagagggctgggctgaccaggtactccagatttttcttccttgcggttgatgcagcttttcatcttaattccaagtgtcttatccaacacattgaataaacagtaatccacttggtagtccttggttaaattgtcatcttcatgtcaaattggagacactgatgggctataactggcccacgtgcttaaagaattggcgccagaccttatatctcatgctctggtcactaggttgtgccttatctttactggacctaggagaaaatgtcatcttacagatgactcagaaaataagtgaattctggcttgctacacaaaaaagcagtctgacccaacttcagaaggacagattctcttagtagtgtgtatatacaggagagagaataaactccggtgtcatgcaaataaagattcaaatatgattcttctctttgttttgggaaagtttcttacctcccacagccttagtgaggaggtgtctttcttgtccttctctcactgagtcttaacagtgagagaactttactttgacttccttttgtcttgatggtctttcttcacttggtagagtacagacttaagtgagattcagagtcttctatgtaagttggaagtgtgaaagtaaccaagtaggacagcacaagtagatgccaccttccctgtggctggggcctttctcccttagatgcttttaaccaatgtttcttggtggaggcctagaggacccaccaaactgtcctggatcccctcttagctccaagccataatgcaggatggtagaactatccacctgctggattgtagcgtcacctctccacaggtaagcagggagactgctgagtcgtgtttcagaagcacactgagcttggtccagaacatgcatgatgaaataattatcatggtgcattgccagacaaagtttctagtgctgtatgagacctagatgcatccagtggatgtgggacaggtgtgggatggtcttacaaaggcttgctgcagtttggtagcaggtgacatggtggaaagagcataggctgtggagtcagaaagacctgggcatggaatcctggctcagcaaccccatagctgtacaacctaaagcaactttcagtctctgtgttttcatccataaaatgcagaaaccaggacctctcttgagcagggctcaggaaggatcaaataaaacacctagcagcctggcctgagagtaagttgactggaccagtgcagcttcctgccctccgccctcagctgggcccctagggcgtggcagcagtgctttgcctatgtcttggggatctgttattgaaactgtttcaggctgattccactcacctgtcctcattctcatctcacaagggtccacttacttccctatttctgtctcagaatttctccatttcttcaaccgtattacacttcccttctatccgagagaacaagtatgctcctttattccagtcacaagccctttttttcttttttaaaaaattctgttccctaagatctccaacttcccttgtgctatttactaataattattttcccctcctgcccaccccccccccatcttcattgtccccctttgttggctatctgctttctgtggataaacacaaggtgtccttattctagcttggtcctcattccccagtgcagctgtgcattgtttcctgtccagtctgtcccaccccctccttgcctactcagttcttactcccttgcgatttagttctggcctcccctgctctcctgacagtgtcctcttgaaggagatattcttcaccttccttggctttcctgcagcattcgatagaaacatgcatgacttatgtatttttctctgggcctctctcctggctctcccccaactttctcactcctctggctatgactgattcctctttcttcctctcctcttctcccacatctccacactccccaggtgctctttcactgttctcagagctccagctgtccttgcgaggatgactctgcattcctctctcagacactagactcattcccaagtatcctctgtaaatctccacctgccacctcaaattcagcttgtcccgaaccaaactcattttcttcttccccatccccgaccagctcttattgacattcttatttctgtttagcggaaggaagcaccattttccctattgcccactgagtcaacatgttctattaatccatcctggtgttccctgaaatctgttcccatttttataaccagaaaattatagaaaagatggcaactaatatttattaagtgccttttgtgtgccagacactgtgctaaactctttatgtgtattatctcatttaatccttaaaacagccctatggaatgtgtactatcattgatccttacagatgaagaaattgagactaagaaatcacttgccatgggtcccctggcaaataagtggtggagccaactctggaactggttttttgtttgtttttaaatagagatggggtttcaccatgttgcccaggctggtctcgaactcctgggcgcaagggatcctaccgcctcggccacccaaagtgcaaagattacagatgtgagccactgtgcctggcctggaactgtattgtttttttttgttttttttttttttggagacagagtctcgctctgtcgcccagtctggagtgcagtggtgtgatcttggctcactgcaacctccacctccgggttcaagtgattctcatgcctcagcctcccgagtagctgggaccaccatgcctgactaatttttgtattttttagtagaggcagggtttgaccatgttggccagcctggtctcgaactcctgtgatccgcctgcctcggcctctcaaagtgctgggattacaggcgtgagctactgagcctggcctggaactgtattcttaaactctgtgttgggctgcctatgtcctgaaaatgtttttcttgaccttttttatggtcatttcattgcattccataataaacaaatattaaatttaaagttcttgttattcatggtatattgaaatgatcatttgcttttcttaatgtatagtttatattcaggcatatttcttttttcttttctttttttttttttgagacagaatctcgctctgtcacctaggctggagtgcagtggcactgtctcagctcactgcaagctctgcctcccgggttcacgccattctcctgccccagcctcccgagtagctgggactacaggcgcctgcccagctaattttttttttgtatttttagtagagacggggtttcactgtgttagccaggatggtctcgatctcctgacctcgtgacccgcccgcctcggcctcccaaaatgctgggattataggcgtgagccaccgcgcccggccacatatttctaaaagaattggtagcagcttataataaaaatatatttttaacagtttaaaaagtaaaaactgatcatggtatgttatgagaatatggaaacatgggcattttacatacaaaagtttgagttatagttggcatattttaaggcacgagagtaagtctaggaatgtgtggaaagtgttatgactaaagttttaagttttagtatttagtttaaggatatgtaatttatttccagcttggaataaagatgaaaatagacagtgaaatcagctttatagatttctcttagtcatgcagatacatatatccaacgtgtttgcattctgactcaactcctgcattagaacagaaaatgcagacttgacttggttcttattcttatcaccagtcatctgaagttaaatttaccagaggggtttgtgtttatggagagggaaaaagggggaacaagaaaggcttgagattaaaatctcaatattttgtttggattcaaatctttccaaatatgtttcagatcgttctgcagtgggagcgtgtgactgcggaagctgtgaagccacgggagacctcggagcctagagcagcagctcagcgcttctgtgagaaattccctttcctttgaagttttttgccctttatttgcatccttaaagcagttcgcttgttttccctccttggaaaaattaattatgatagtattggcttatttatgatcaccaagacttgtattcccttagcatagcttacagtataagttcacacttagctttgagcaccagcaccaggaagacagctttttaaaattacttacttacgtaccatcttgttccaaaaaagatttgtggtggtacaaaagctatatagaatacagaagatgaaaaaggaattgagtgtagccagagggtggaagcagcccaggtgtcccatcaacagataaatggataaacaaaatgtgaaatatacatacaatgtatttcaggctttaaaagtaaggaaaccgacacaacatggatgagcctgcaagatgttatgctaagcaaaataagctagtcacaaaaggacaaatattgtgtgattgttcttgtataaggtacctagaatagttagattcgtagagcaagcagaatggtggttgtgactagggaggcgggggtggcacgggcaggaatagggagttattgtttaataggtacagagtttcatttgtacaagataaaaagagttctggagatggatggtgatgattgcacaacagtgtgaatgcccttaataccactgaactgtacacttaaaaatggctaaaatagtaaactttatgttatgtatattttatcatgattttaaaagaaaaggaagtaaatgatgaaatcaaagtgaaggaaatgtaaaggtactaaataagaatccagggcataccaaaaaaatgtaaaataggttgtatcatttgctatttggctcttagagtcaaatccagatttcgaataatgaaggctgtcatttttgtggcctttagtgtgtgtcaagcattgtgctaatcactttatgtacatgatctcatgtatcttcatatcacccttatgaaataggttttgtatccctctagaggtgattaaacagaatctcagacaagtcacttacccacggtcacttctaggaagaggcagatctaggatttaaatccaaatctgtcagactgtagtatgcctccaacctgtgccgccatgcacaccacagcgacctcacagggcactcaaggcaaaatgcaatcaatgcagatatcaccctgtttgggcctttgtcatatccctgggtttatcctagactgatgagggaattagcatatgccagtgtagtgaactcatcatccctcccttctgtcacagatgggaagcggtctcgagcagaagccccactgaagtgtcccctggcagacacccacatgaactcttccgagaaactccagttctataaagagaaagccccagattgccatgggccagtgttgaaacacgaagctatctcaagccaggagtcaaagaagagcaagaagagaccttttgaggagtcagagacagaacagaataactcttcacaaccttcaaagcagaaatatgtatgtcttgctgtggaagactgggacttgttaaattcctattgattagtagatacaagttgacctttctctggcccccagctctagtgtttgagtaaaggagactgaggatgatttactttttgtttgaatttacctatggcattagcatagtaagcagatatttctacttttgtggtgtgggaggggaatgctatggaagtatgtaataatttctaatgtatattttcaatacatagtaattttttcaaataaacatttttgctgtccttaagttctgcttgtggattatagactggagccacaggaaataacacggtttgggatggaaggccaggtgaactaacaaggcagcttagcataactcagagatactgcaggtttggttccagaccactgcagtaaagcaaacactgcaataaagtgagtcaccagactctttcatttcctagtgcatataacagttatgtttacactatatagcagtctcttagatgtgcaatagcattatctccaaaaagaaaaaacatgtatataccctcattttaaaatactttattgctaaagaaaatgctaacaattatctgagcctttagcaagttacattcgttttgttggtggttggggggtcttgcctttgttggtggatggatgctaactaatcagggtggtggttgctgaaggttggagtggctatggaaatttcttaaaataagacaatgaagtttgccacattgattgactcttccttttgtaaaagattttgctagagcacacgatgtggtttgatagcattttacctacaatagaacttctttcaaaattggagtcagtcccctcaaaccctgctgctgctttatcaactaagtctatgtaatagtctcagtcctttgttatttcaacaatggttacatctttaccaggagtagattccatttcaagaaactactttctttgctcatccataagaagtaagtcctcatcctttcaagttttatcatgagattgcagcagttcagtcctatcttcaggctccacttctagctttcttgctatttctaccacatctgcagtttcttcctccactgaagttttgaacccctcaaaatcatgagggttggattcaacttctttcaaacccttgttaatgttgattttttttttttttttttttttttttttttttttttgagacagaatcttactctgtggcccaggctggagtacaatggcatgatctcggctcactgcaacctctgcctcctaggttcaagtgattctcctgcctcaacctcccaagtagctgggattacaggcgcatgccaccacgcctggctaatttttatatttttagtagagatggggtttcaccatcttggccaggctggtcttgaactcctgacctcaagtgatccacctgcctcagcctcccaaagtgctaggattacaggagtgagccaccacacccggccctaatgttgatattttgacctcttcctatgaatcacaaaatgttcttaatggcatctagaatggtgagtcttttctaggagggaaagtttagttttgttttttgagacagggtcttgctctgttgcccaggctggagtgcagtggtgtgatcatagctcactgcagcctcgaccttccaggctcaggtggtcctcccacctcagcctcccaagtagctgggactacaggcacatgccattgtcacacctggctgatttttgtatcttttgtagggatagggtctcaccatgttgcccaggttggtctcctgggttcaagagatctgcccacctcagctcccaaagtgctagtattacaggcgtgagccactgcacctggcctccaagaggtttttaatttacttatttactttgtccagatccattagagaagtcactgtctatggcagctattgctttgtgaaatgtatttaataataagacctgaaagttgaaattactccagatccatgtgctgcagaataggtgttatggtagcaggcatgaaaacaacattcatcttgtaagtttttgggtgatcaggtatattgtctatgagcagaaatattttgaaagtgcctctaatttgtggactacacattgagtagcaaagctctagacctttactgtccaatatgtagctcctagctacatgtagctattaaatactcgaaatgtggctagtccaaattgagatgtgctataaaatacacactggatatcagatatcaaagacttagtatctaaaagtttgaatgaaaaatgtctcagccaggcgtggtggctcgcgcctgtaatcccagcactttgggaggccaaggcgggcggatcatgaggtcaggagatcgagactatcctggctaatatggtgaaaccccgtctctactgaaaatacaaaaaattagccgggtgtggtggcatgcacctgtaattccagctacttgggaggctgaggcaggagaatcgcttgaacccggagggcagaggtcatagtgagctgagattgtgccactgcactccagcctggtgacacagcaagactctgtctcaaaaaaaaaaaagtctccattttgaaatactggttacatgttaaaatggtaatttaaaataatttcacctgtttttatttttctaatacggctactagaaagtttaaaatcacattcatggcttgcatttgtgattgcattatatttttactggacaggactgctctagaccgtattcatctttaaaaggtgagctaaaagcaagagttactggcaagtaaaaggaagggagaaaatacctcaagaaattgacaacattagtttgacatttgtaagtgctctggagtttaatgaggattttatttattatttattcattattgttttttaacttttaggttcaagggtacttacggagatttgtcatataggtaacttgcgtctcatgggggactggtgtatagattacctcgtcacccaggtaataagcgtagttagtacccaataggtagtttttcgatcctctccctccaccctcaacaggccccagtgtctgtggttcctttctttgtatccatgtgtactcagtgtttagctcccacttacaagtgagaacatgcagtatgtggttttctgtttaatcaggattttaataaaggtagatcttagataaaatatgtgttaattgctactctgagctaggcaaggtactacctctttaaaggtgggctgttacccaggatcatatcaaaagcttgatttctgaaatttataaaatgaaaaagcgaatacagtgctgattggttttctctgtaacaaagtagagttttaaaatatcatttgaggccgggcacggtgcctcacgcctgtaatcccagcactttcgtaggcgaaggcgggcggatcacttgaggtcaggagttcaagaccagcctggccaacatggtgaaaccccgtctctactaaaaatacaaaaattagccaggcatggtggtgtgtgcctataatcccagctgctcaggaggctgaggcaggagaattgcttgaacccgggaggcggaggttgcagtgagccgaaattgcgccactgcattccagcctgggcggcagagcgagactccatctttaaaaaaaaaaaaaaaatcatttgagtggacagtagcactctgtcaaattccaaatgccaatcaacagctggctctacttgtcaaagttggcatattattgttagtcaaaccagagtccaatttgatcaccccctcatgcacacaatcccaccaccaccaccggactccactgttgcctgtggggcaataatgccatgttaacagggagcatctggaattactcttcaaacatccgcccattttgatcactgtggaaggcaaatcttccttccacatttaccccttcagagcaacttgtgctcacttctctcatcaacacagtgtacttttaaagctaagatttcattttctttaatcctttttttcaagaatcagatttttctctgctgacgattcctttaaacaaatatttcttgttttggtctgaggaattcattctttgaaatggagttatagaagtctaggctttgttttgatgactgaggtgaaggccaagaatttatgaccagcatacaatagatagggtaatttgtgtgtttgtgtaacttacatgtgaggataggctgttttttaaaattagaatttgtttctgccttcttagaatttacttactgactcgttatgaacttcgcaaagtgactcaattctgaaaatcctcatacctctttaaaactctgctgcctacctacataaagcttacaagaatgaataaatcagtgcttctcaaaaaacatgttctgtgaacccctgccccagagttttctgtggtatttgttaaaatgaagattcttagaccccacccatgtttattgaatcagaatctcatatttattatttatttatttgatatggagtcttgctctgttgccaggttggagtgcagtggtgcaatctcagctcactagttgaacccgcctgctgggttcaagtgattctcctgcctctgcctcctgaagagctgggattacaggtgcccgccaccatgcccagctaatttttgtatttttaacggggtttcaccatgttgggcgggctggtctcaaactcctgacctcaggtgatcctcccacctcagcctcccaatgtgctgggattacaggtgtgagccaccgcgcccggcctgaaccagaatcttttagtttatgagaattactaaagaatctgatatcaggccattttttttttccatgtattcattttaaaaacctgagccattcatcagtttatttgaacaggtatctgttgaacacttaacatgtaccaggtgctagggactcagcaataaacaagacaaaatacagtattttcctttaaagagcacagggtgagcagacacaaagttaagtgaacagaacagtcaatcaagaagctaagttcacatagcgataagtaaagaaaatggaacagggtaatgggatattgggagttatggaaagttaatttagatttttaattaacttagggggttacagaaggcctctctgaggaagtgacacttgagctgagaagtatgataagaaggagctgataatgcacacatctggaggagggtctcagggaaggaaagaacagtgcaaaagtcaaggtgggaaatgtttggcacattcaagggacagaaagaaagacaagtagaaggcctgagactgggcctcagtccttcccacacttaagatcaggcagagagcagtagatgtcaaggttgaagattaatacccaggagagcatttaatataaacttagaaatgtaaatgtttcaacaagaagtgggtagtgaatgactattagatgaggtgagttggagttggtggctttgattgggttgggtggagagatgaaagttaaaagcctgattggatgtagcttaaagagaatgggagacaaggaagtggagacgagctgcagaaaatgtttaggaagttttactagttaagggagtaaaaattcaaaattctggtggtaacgggtcttggggtcaaaagaaggttttcttgcataatttttattcaaacatattcaaaagtagaatagaacaaacccccatgtacccattacccattgtgtttgggtgaataatggccccacaaagatgtccatgtcataatccacagaacctgtggatatgttacacagcaacagggactttgtgtgtgtgattaaattaaggatcttgaagagagattatcctgtattatccagatgggttcaatatattcacatggacccttagggaggcaggaggatcaaagtcaatagtaggagatcagccaggagtggtggctcatgcctgtaaccccagtacttcgggaggtcgaggcaggaggatcgcttgaagccaggagtttgagaccagcctgggcaacatagcgagatcccatctctacaaagataaaaatgaaaaatttagccaggtgtggaggcatgtacatgtagtcccagctactccagaggctaagcagggaggactgcttgagtccagtagttggaggctgcagtgagctataattgtgccactgcactccagcctagacaacagagacctcatctctaaaataaaaaaggtaggagatgtgctgatatctgtaatcccaatgctttgaggggccaagaagggagtatcgcttaaggttaggagtttgagaccagcctgagcaacatagtgagaccctgtttctacaaaaaaaaattttttaattaatcaagcatgatgatgtgcacctgtagtgctaggtactcaggaggctgaggcaggaggatcacttgagcccaggagttcaaggctgcagtgagcaatgatcacaccacagcactctagcctgggtaacaaagtgagaccctgtctccaaaaaaaaaaaaaatagtaagagatacgatgatggaagcaagaggctcaagtaacacactgaagaagccaagagccagaaaatgcagcagtctctagaacctgaaaaaggcaaggaaatggattctcccacaaagcctccaggcagaaggaaaatacaggagaatgggagtgttaaagagccagccattagcttttccagtcatgaagtgcttgggacatttggcttcttgacggttttttttttttaagttaaaaattccttaatttttttattcctggtaccactaccacaatttacagggcaatatatctgatgtaatgaaaagaaaaaaagatataacaggaatgtacatctaattgactctgcattgcattaatcagtagctgcactttttggaaactgtggctgtgtcagtcctgaacaagaagggtttcctgtttaagctgcagtaacttttctgactatggatcattgctccttctgtggcagatttttacagttcctctaatgcatgtgggacgactgtctcaaagtaacctgcagctttcctgacaactccttgctttctctcctgctaagaactgtagcccttttctgctgtttttagaaccttctgctaccatatctaccactcccaccaccagatccataaccaccatcatagggactgcctgagctgcttccaccaaaattgccccctttcatgagtccttaatttgattgctgttgtccattataatttccaaaatcattatagttcccaccaccaccatagttaccacggccaaaatttcctccttcattgtaaccatcatatcctccaccaccgccaccatatccaccaccttggtttccacatcctggtccaccacgaccatagccccctctactactataaccaggaccgccgccatagttgccaccatcacctccaaatccattatatccaccatcacctcctccataactatctctgctgccaccacctccaccaccatagcctcctcctccaccaaagtttccaccacagccaaaattacctccaccacctccaaagttttttccacaataaaattgccagatccatctccacaacctctctgtgatccagcagactgcatctcttatttagaaaggggctttttcacttcacaattatgcccattaatagtgtggtatttctgaacaacaattttatcaactgtatcatgatcatcaaaagttacaaaagcaaatcctctctttttttccactctgcctgtcttccataacttctgtggtctcaatcttgccatacttttcaaagtagtctctcaaattatattcttctgtatcttaataccaccaacaaaaattttcttcactgttagatgggcgccaggctttacaaaatcctctctggaaacagctctctttggttcgactacacacccatcaaccttgtgtggtggagcacacattgctgcatccacctcttcaatataagaataagtcacaaaaccaaagcccctggagcattttgtttgggggtctctcattaccacacaatctgtgagtgtgacccatttctcaaaatgttctcttaaaccatcatctgtagtttcaaagctcagaccaccaataaacggttttctcaactgctctcgttcctttggatcatggccctcctccccctggcagcaacggcgatggccggagccgggctgggggcaaccggcagcagttttacctccatcttgagaccagacttgcctcttccaactcaagttcaatatggggatgagagcttcttgacaggttttgcagagttgactcatttgagattctccctactccctactccattaacactgagttttaatgttaaacttagctttgttcctctgggatcctataattagacagaggtaataccaagtcaaaataaatagaatatcttaccagaaggccttgctctgtttctaatctgtctactgaaagtctttttgcagctttggtttgggagtgccatgaaggtgtagctttggaatagatttgtaagagaatattctggcaacggtaagtgctacatgactcctggtgagtaaagaacaatggcccagcttttctgaccacctttaaaatgtatcttttgccatattttttatgagttatcataaaccccaaattaggagtccttaatacactaggtgctgagccctggccatacttgtattctctcaattggagaagagaaattacaccgtggaattcctaggttggcctgaccaggcccacttggacttcctgctgttgtggttttcctcttgagtttctgtagtgaggtcccctctgcccctgcttcagcttcctgctcccagcaactccctcctggcctcagctctcaaagatggttcttcagtcccagaaggatcagcctgagactgaaattggaaaatccaggctctaatccagattctgccacttgccaacaaatctcttcccctctctgggccttggtttcctcatctataaaaaagaagacagtccaggcatggtggctcacacctataatcccagcactttgggaggccaaggcaagaggatcatttgaggccaggagtttgagaccagcctggccaacctagtgaggccgtctccacacacacacaaaaattatccaggtgttgtggcacgctcctgtagtcccagttactcagaaggctgaggagagaggattgcttgagcccaggagtttgaggctgcagtgagctaagaaggtgccactgcactccagcctgggcaacagagagaccctgtctcttaaaaaataaataggccaggtgtggtgactcacgcctgcaatcccagcaccttgggaggacaaggcaggcagatcacttgaggtcaggagttcgagaccagcctggccaacatggtgaaaccccgtctctactaaaaatacaaaaatcagctgggcagggtggcacacgcctgtaatcccagctactcgagaggctgaggcaggagaattggcttgaacctgggaggcggagtttgcagtgagccgagattgtgccactgcactctggcctgggcgatagagcgtgactcagtctctaaataaataaataaaattaatttaaaggctgagcgtggtggctcacacctgtagtcccagcactttgggaggctgaggtgggtggatcacctgaggtcaggagtttgagaccagcctggccaacatggtaaaaccccgtctctactaaaaatacaaaaaaattagccaggcatggtggtgagtgcctgtaaccccagctacttgggaggctgaggcaggagaattgcttgaacccgggaggcggaggttgcagtgagctgagattgcgccactgcactccagcctgagcaataaaagcaaaactctgtctcaaaaaaaaagaaaaaaattaaaaagaagacaataacaaatttgcttgatggagttgttacaggaattaaatgatatgatgtggtgaaaatgcattaaattataaagtgtaatccagaagttatctaattataattattccttagtggaatctttgaatattctcatagctcttcattttaaaatggggaagctgaggctcagagagaagtttactcattgtgatagttcatcttatgtgtccagttggctaggatacagtgcccagttgtttggtcaaacaccagtctggatgctgctgtgaaagtatttttcagatgagcttaccttttaaactagtgaactttgagtaaagcagattaccctccaaaatatgggagtcatccagtcagttgagtatcttaagagaaaagacaggtcccctgaagaagaaggaattctgcctcctgactgcctgtgaattcaagacttcagcatcaactcctgctggaatttccatcctgttgacctgccctgcagatttcagacttgctaggcccacgcaactgcatgggtcaattccctcaaataaatctctctctccttacctctctctatgtatatattgagatgcagattatagataggttatagatctaggtacacatacacggtactctctattggttctgtttctctgaataatccttactgatacattcatcctttccctcatgaagcaaataattattaggcacctactgtgggctctgttaggtaaagcaaataagacagggtctctgccctcaggcagggaatagacaagtgacttcccacatacaatgtagcgcgaccagtgctctgagtggggtgtgctttgggaactgtggatccacagtggaggaatgttaaaatggttaactgagagctgtgaggcaggaaatgcttcccaaaagatagtgatgcctgagtgagttttgaaggatgaatatggattagcaaagccaagaagagaggggccaggcatttcaggcccaggagtatgggaagcaggggcagcatttatgcacatgagaccctcgggagttccaggttgctggagccgaggggtgttggagagagctgagcagtgaagcaagagcagtcagcaggggaccccttttagagatgccctttatcctggaagtcacagggagccctcaaggactccaagcaggggagacagggaactgagtttcagaagggtgcctctgctaccaggtggaagctgacctggaggggaccagtgaggagccaggttaggcccgatgtgaggcagaggatgaaggagggatggcagtgacaggtgaccattccctcaacacgtggccgagctcctgttaccagtgagaccctctgctcagtgatgaagctccataataaacaacacagacactgcttctagggagcttgttgatggaacagaggggacttagcattgactattgatctgttcatctgagggtcaagagagctatgggtcagagagagattgggaagaagctagggtgagactaaaatctgggaggaaaaataggctttgtgttaagaacctggaattgtatgtaaaatattgtgcatttggttggtttttttcccccattctgtagagaggatctacagtcatcatcacattctcaaaggggagaaaatatcccaagttaggaaacactgaagtagaatgcagtgagcagatggcagagggtggagccctggggaatggcaatattgaaagggcggcaggcagggcacggtggctcacgcctgcaatcccagtactttgggaggctgaggcagggggatcatttgagccaggagttcgagaccagcttgggcaacatggtgaaacctcatctctacaaaaaaatacaaaaattagctggatgtgatggtgggcgcctgtagtcccagctactcgggaagctgaggtgggaggatcacctgagccctgaaggtggagactgcagtgagccgtgattgcgccgctgcattccagcttgggtgacagagtgacaccctgtcttaaaaaaaaaagaggcagaggaaaaggcaactgagaggaaatggtcaaagaaagaggaaacaggacagtgcagccttatggaaacctagagaggggagagtcccaagaagccaaggactgctcagcgccgcctcctggtccagagcaggtaaaggagacaggcagacaccagccatttgatttggagttgaggaggtgggcagagaagaacctcccagagaagaaagccattttatatcaggaagcccgtagcacaacacacgttcatatgctgcaaggagcaagccaggagaatgagagcggtctctggccaccaagctccaggctgcatcattccttgcccttcgggaaagcggtggcccccaaggagcaaaaggaaaccaagcgataagtgaatgatggcagccacgtgcagctgtgcactgaggcttgctcagaagcttgaaaacctggatcccaggaggaacagccgaagagcttggggttctgcaacttgagaggcctctggggagatgatcagctgttttcagaggaagggctttcctagggcagagggaacaggtatgttttctggatccaggactaattaaagcaagacagagtggattcagtagcagagggaattttctaaagtcccagaagccaagaggagtagcaaggcccttgtcttcagaagtgtgcagaggctaggtgtttatttggcagggctggtacacagacgatccaaacctcaggtcggggttggattccatgacctttaaggtcccttccagagttaggaatatctaatacttatcagatttctctgtcatcttgaagggttttgtgaaatggtccaaaagactattgtgatgcattttattttttaaaaatcatgctacataaggctcatgaggttaggggtagaaacggatagtgcggcttaaaaaaatagcacatctagcaagtattatacctcttaagaaggaaatcattgactagggtttggatcagtggttcccaaaggtcacttgagggcagataacctccacccctctattttaactctaagagcccaggttggacccaaggtgggcccaggaatctatcttattttattattttatttttttgagatgcagtcttgctctgtcgcccaggctggagtgcagtggcgtgatctcggctcaccgcaagctctgcctcccgagttcaagccattctcctgcctcaacctcctgagtagctgggactacaggcgcccgccaccacgcctggctaatttttttttttttttttttttgtatttttagtagagacggggtttcaccgtgttagccaggatggtctcaatctcctgacctcatgatccgcccgcctcggcctcccaaagtgctgggattacaggcttgagccactgcgcccagccctatgttttaaataagcaacagtgctccacctccaacaaaaatctgatgtggcagatcccaggactactcttttgagaaactgggtgatgacggactgaggatagcaacaatcctccaaataaagtgctctataaatggcgatgtgctttgcggttgggaaaaacaaggctcagcagtgtggaatgtgtgccgggacaggctggaggcaagtgtaaatcccagattgacctcaggtccaggtatttccccttggcattgagcaggctaaatggagaattttgcaggccttgatctcattcactttcatcactcccacctgggcggaacaggcggctcaaatcactgcctcagtctgctggtctataaaatgaaataatggtgattgggcctgtattctccacgaatgagggagaacaaatctgcaaagtatggacccccaggactgagtggggctggaacactctggagaaagctgctatggactaaatgtttgtgtccccctgaaattcatgttgaaactctaatccccaacgtgatggtatttggaggtagggcctttgggaggtaattagggtgagattagatgatgagggtggagcttccaagatggaattaatgcccttataaaaagaggaagaggctgggcgcggtggctcatgcctgtaatcccagcactttgggaggccaaggcaggcagatcacttgaggtcaggacttcatgaccagcctggccaacatagtgaaaccccatctccactaaaaatacaaaaattagccaggtgtggcggtgcatgcttgtaatcccagctactcgggaggctgaggcaggagaatagcttgaacccgagaggcggaggttgcagtgaactgagatcgcaccactgcactccagcctgggtgacgagcgagattccatctctaaaaaactaaataaaaagaggaagagacacagtgctctcttgctgtctcctcctccacccacctcctcctcctccttcccccctacttctctccctccctgaatgcttgcaccaaggaaaggccatcggaggccataaccaggaagagagccctcacgaagaacctgaccatgttggcaccgatctcagaattccggcctccagaattatgagaaataattatttgttatttaagccaccaagtgtttggtattctgttatggcagcccgaactaaaacacatgactatttgctcaaaggattcagaaagcagccaagaaggaataacgggggtcacattcaccctcctgcctggaaaaaactgggcagaatgtatgaagcaatagtttcaaagtgctagacagcaggcaacaaaggacagtgatcccggagaaacaggaagcaaacgaggtgagccccgcgatggctccagctgcctgcgggggaagtttccaggctgcagcacagggaaggggagcagaggcggagcccaacagaattcctgaattgaagcagcaggagctcccaggacagcatactggagaggaggagcggcacagagacatctccggagataatgcgcagagagagaacttcagcggagtgctgctcagcatgtgcgtgtgagcaacccactccaggccagggtaggaaccacccagaaggatgagaggaatctaactttgatggtcataaaaaacagaatagcttctgttcccaccagtcagacaggaaagcctcattatccatggggtattggatagggcactcgggagagtcttgcctcagtcatggggaataattaatcctaggtaataattagcctagacaaaacatggctctgctcccacccaataaatcttaaaagcaagaatttaaaggatcaaactgtttcaagtaacttaactgcagtcccaaaacagagctcgagaatatttacaggaaatcaaaaatacctagcacctgacaaatgaaaaatcttaatgtctggtccagtaaaaaattacttggcatggtctatatataaaccctcactttacaaacaattgacttttgacaagggtgccaagataattgaaagggaaaagaatagtcttttctgtattttttcttgttttagagatgggatctcgatctgtcacttaggctggagtacagtggtgtgatcatagctcactgcagcctggaactcctgggttcaagagatcctcctacctcagcttcctgagtagctgggaccacaggctcatgccaccatgcctggctaacttttttttttttaattttgtgtagagacagggtctcactacgttgtctaggctggtctcaaactcctggcctcccaaagtattgggattacaggcatgagccaccgtgcctagccaagaatagtctttccaacaaacggtaccagacaacaactggatatccacatataaaagaataaagttagacttttttcttcatactatatccaaaatttaactcaaaatggatcatagacttaaatatcagggttaaaactataaaactcttagaagaaaatatagccataaatcttcatgaccttgggttagacaaagccttcttagatatgacaccaaaaacaactgacagttggtagggctcagtggctcatgcctgtaatcccagcactttgggaggctgagacgggcagatcacttgagaccaggagttcgagaccagccctggccaaaatagtgaaaccccatctctactaaaaatacaaaaaattagctgggcatagtgtcaggcacctgtaatcccagctactcgggaggctgaggcaggagaatcacttgaactcgggaggtggaggctgcagtgagccgagatcgcaccattgcactccagcctgggtgacaagagcgaaactctgtctctcaaataaacaaataaacaaaacacaatagacaaaaataaagataagttgaaatttatttttctaatttatcctttttgtcaattagaaaaataaattttaatttatctttttatttttgtcaatttatcaaaactaaattcttttatcctttgatggacaccatcaggaaagggaaagacaggcccactgaattagagaaaacattacatcacatgtctaataaagatctagtatccagaatgcataaagaactcttggccgggtgcggtggctcatgcctgtaaacccagcactttgggaggtcaaggtgggcagatcacctgaagtcaggagttcaagaccagccagtccaacatggtgaaaccccatctctactaaaaatacaaaaattagctgggcatggtggcacatgcctgtaatcccagctactcgggaggctgaagcaggagaatcacttgaacctgggagtaagaggttgcagtgagctgagattgcaccatggcacttcagcctgggacagagcgagactccgtctcaaaagaaagaaagaaaaaaaaaactcttacaactcaacaacaaaaagacaaataacagacatttacctgagtagacatttctccaaacaagataaacaaatggccaataagcacatgaaaaggtactcaacatcattagccaccagggagatacaaattaaaatcacagtaagatgccacttcacactcacaagaatggctatcatcaaaaaaacagataacagccagtgttaggatgtggaaaaactggaaccctcatacactgctggtaagaatgtcagacaatacagtcactgtggaagagagtctggcagttcctcagaaggttaaacatagttaccatatgacccagcagtctcactcctagagaaattaaaatgtagatccatgcaaaacaggtacacaaatgttcatggcaacattattcataatagttcaaaagtaaaaacaacccagtgtctatcaactgatgaatggataaacaaaatgtggtctactcagtacagtggaatattattagcaataaaaaggaacgaagtactgatacatgctactatatggatgaaccttgaaaacattatgcaaggacaagaagccagtgagaaaagaccacatattgtaggattccattgatgtgaaatgttcagaatcagaaaatctacagagaaaaagtagttgcctagggatggggagttggggagtgactgctaatgggtacagagtttcttttgggagtggctaaaatgttttaaaagtgattatgatgatggttgcacaactctgtggacatactaaagaacattgcactgtatttttattttattttattttatttttgagatggagtctcgctttgtcccagtctggagtgcagtggcacgatctctgctcactgcagcctccacctccagagttcaagtgattctcctgcctcggcctctcaagtagctggaattacaggtgcacaccaccatgcccggctaatttttgtatttttagtagagacagggtttcaccatgttggccaggctggtctcaaactcctgacctcaggtgatccacgtgccttggcctcccaaaatgctgggattacaggcatgagccaccgtgcctggccgacattgtatatttaaaataggtaaattgtatgatatgtaaattatacctcaataaaactgttatattaaaataaaattactaggcattaaaagaagcaagaaaatataatccataataaggagaaaaccctatctatctaaatcaactcagaactgacacagatgttaaaatctgcagagagagacattaaaagttatcattgtgtttcatatgttgaaaaagttaaatagagacatggaggattttaaaaggcccaagtcagactcctagagatgaaaaaacagtctaaggtgaaaaatgcactggtggagttaagggcacattaaacatagcagaagaaaaaaattagtgaatttgcaggcacagcaatagaaactatccaaaacaaaatacagagaggaaaaataattttttaaagatgagcagagcatcactgaactgtggtacgcttcaagcagcctaacatgtatgtaactgaggattcaggagaggagagagaaggggagggacagaaaaaaatatttaaagaaataataggccgggtgcagtggcttacgcctgtaatcctagcactttgggaggctgaggcaggtggatcacttgagatcaggagttcgagaccaacctggccaatatggtgaaactcagtctctactaaaaatacaaaaattaactgggcatggtggcgggcacctgcaatcccagctactcaggaggctgaggcacaagaattgcttaaacccaggaggtgaaggctgcagtgatccaaggtcatgccactgcactccaccctcggtgacggagtaagactctgtgtcaaaaaaaaaaaaaaaagaaaaaagaaagagataatagtttaaaatttttcaggcttgatcaaaacaaatccaagaagcccaatgaaccctaagtacaagaaacatgaagaaaaccacacaaaagcacacatcataatcaaatcgatcaaaagtgatgataaaatctagaatcagccagagaaaaaaagacaccttacatacagaggaacaaagatacaaatgacaggtttctcattggaaacattgagaacagtgggaaaacctctttaaaatactgaaagaatttattaccagtaggcctgccctataagaaatgttcatcgaagtcctccaggcagaaagaaaaggatatcagatggaatatggatctatacatgaaataataaggagcactggaaataactacattgctaaacatatctctttcttactatttcaatctccttaaaaataattggctgtttaaatgagaataacagcaatgtattataaaatggatgacaattgcacagcggtcgggtcaggagaaatggaagtatactataattaggttcttatactatatgtgaaatggtattatatcgcatgaagatagactgtgataaattcaagatttatactataaactctaaagcaaccactaaaataaaacagagttttagtttcaaagcctacaaaggtgataaaatggaatcataaaatgtgtttaacccaaaagatgtcaggaaaaaaaaggaaaacggaaacaacagatggcggcaaatagaaaacaaatagcaacatatttaaaccatattaatattcacattaaatgtaatgtaaatggcctaaacttctcaatttaaaaggagattgtgaggtaaattaaaaagcaagacccaactatatgttgactaaaagaaacacactttaaatataaagacacaaaaaagttaagagtaaaagggtagaaaaatataccatactaacactaattttaaaaaacctagggtggtcaaactattattagacaaatagattccagaaaaaaggaatattacagtaggccgggcgagtggctcatgcctttaatcccagcactttgggaggctgagacaggaggactgcttgagcccaggagtttgagatcagccaaagcaacatggtgagactccatctctacaaaattaaaaaattagccacatgtagtggtgtgcacctatggtcccagctacttgggaggctgagatgggaggatggcttgagccctggaggctgaggctgcaaagagccaagattgtgccactgcactccagcctgggtgaagagcaaggccttgttgtttttgttttgttttttaaaaaagaatattacagtagtccctccttatccatggtttcactttctgaggtttcagttgtctgtgatcaaccaggccctaaaatatcacataactactccgcctctttgaggccattaagtaaaataaggtttagttgaacacaggcagttcaacataagcacagtcaacctgataaccaagacagctactaaatgactaatggcaatctgggcagatgaagccagactgtgggagatttcatcacgctactcaggatggtgtgcaatttaaatttatgatctgtttgtttctgaattttccatatacttcacaatgcctatgttattccccttacttaatctcatcatgtcattattatctcaccttcacaaaaagaaaggtgaatacagtacaacaagatattttgagagacagagagaacacatttacttaacttttaatagtgcatttttataattgttctactttactattagttgttagtctcttactgtgcctaatttataaagtaaactttaccataggtatgttatgtataggaaaaaacaaaatgtatataaggtttggcactgtctgtggtttcaggcatccacaaggtgtcttggaacagatcccttgcagatacagagggactacagtaccaagaataaagaagagcaattcaaaatgataaataggtcaattgagcaggaagacataacaatcctaaatgcttaggcacctaataacagagattcaacatgcattaagcaaaaagtgatatatctgcaaggaaaaatagacaaatccacaattatagttggagacttcaataccctctcttgataattgatagaacaagggggaagagattcagcaaggatatagtagacctgaacaacactagcagctcgcctgatctgatgtatatgaggggacttcaaaaagttcatgaaaaatgtggagtatgaaaaactacatgtggatttcaatttttttttgagacaggttgtcactctgtcacccaggctggggtgcagtggtggaatcatagtttactgcatcctccatttcctgggtccaagtgattctcccacctcagcctcccaagtagctgggattacaggcatcagcctgcctcaatttctttttgcaccaaaataaattcatactaacttattataacatgtctgaacactatctagcttgagacgctaagaaggataagactccagtttgaaaagagccccaatcagagcaacatgaattctgctaacactgagcaagaacaaatatcaaatttatggtgaagcttaggtggaagaatggtgaaatcattgatgccttatgaaatgttgacagagataatgccccaaagacatcagcagtttacaaatggttcactcgttttaagaagggatgagatgatgctgaaactgaagcccacagtggcagaccatccacatcaatttgtaaggaaaaaattcatcttgttcatgcattgaaaaggaccaatgactaacagtacaaacaacagccaacaccacagacatctcagttggctcagcttatacaattctgactgaaaaattaaagttgagcaaacgttctactcaatgggtgccaaaactgttgtgcccagttccactgcagacaagagccaagctttcagtgaaaattttaaacaggtgggctccggatcctgaagcatttctttgaagaactgtaagaagaaatgaaacatggccttctatcagtgtgatcctaaagacaaagcactatcatggcagcgggccaggcagagcagaagtggaccagtcaagagcaatggtcaaggcaacactttttcagcatgctcaaggcatcttgcttgttgactttctggagggccaaggaacaatatcatctgcttattatgcggtattttgacaaagttagccaaagctttcgcagagaaatgcccgggaaagtttcaccagagtccttctccaccacgataatactcctgctcattcctctcatcaattgtgaccattagggaatcattaggcatccaccttacagtcctcatttggctccttctgactactttttgatttctaatctcaagaaatctttaaagggcattcatttttcttctgttaataatgtaaaatagattgcattgacatagttaaactcccaggaccctcagttctttacggatggactaaatggctgctatcattgctcacaaaaacatcttgaacttgatggagcttatgttgagaaataaagtttacatttatttatttatttatttattgagacggagtctcgctctgttgcccaggctggagtgcaggggcacaatctcggctcactgcaagctccgcctcccgggttcacgccattctcctgcctcagcctcccaagtagctgggactacaggtgcccgccaccacgcctggctaatgttttgtatttttagtagagtcgggatttcaccacgttagccaggatggtctcgatctcctgactttgtgatctgcctgcctcagcctcccaaagtgctgggattacaggcgtgagccaccgtgcccagcttacattttttaatttatatctccactttttaaatttttaaattttttaaatttttattccacttttcccctttttgaagtggaactttttgaagtccactcacagaatcccacaacagcagaatacacattcttctcaagtacacacagagtaatataatatttctagtaagaccaacaacaaaaaaaaaagaagatatcagtaaaattgataaacctctagccaaactgatcagggaaaaaaatggagacacaaaatactgatataagaaatgagaaaggttgggattactacagattctacagatataaaagcataataacaaaatattacaaataactttatgccagtaaattcagcatctttgatgaaatggataaattccttgaaaaataataccaaagctcactcaagaagaaataatctaaatagttgcatatctattaaagaagttaaatttgtaattaaaaatcatcccacaaagaaaactgcaagtcagatggttacactgttataagatctttggggtgttggccaggtgtggtggctcacacctgtaatcccagcactttgggagctgaggcgagcagatcacctgaggttgggagtttgagaccagcctgaacaacatggagaaaccccgtctctactaaaaatacaaaattctctgggcatggtggtgcatgcctgtaatcctagctacttgggaggctgaggcaggagagtcgcttgaacccaggaggcagaggttgtggtgagctgagatcgcaccattgtactccagcctaggcaacaggaatgaaactccgtcttaaaaaaataaattaattaaaaaaaagaattcaagagcagtttgctgcaggaagtgctcccacatattagttttcaagtgaaacagctataaaggaagcaggatggatattgaaggtttgtgcgacctaagaatgaaggttgccgctggtgccacattgaagagaacaattcccaaggaagaaaagaagttgggagaacctcacaacaaggcagcactcctcttctgccatccctctccaggaaatgcaggattgttgttctgagaatgtctgtgcactagttaatagtgttttgcatgtagcaggcgctcaataaatgtttgacgaatgaacaacaacaacagaaaaagatctttggggtgtcaatttttctggccataaactctgtggttggtggcacctttgcccgagttttgctcgggcccgctgggctcattttgcccactcgatctggcaggctgcactcggctcatgataccagcctgggtcccacactggtcaagggtgagtcaggcatggaacggcgagaggtgtgtgagcgagcctggggtctggccactgcgcaaagtcagacatgctggctgctacagtgaggtgggcagctctctgtgaggctgtggccagacccggcaaacctcaagcagcttccatggctggcaccagggaacacagtggcacatagaagcttggagatgctaggaactgcagggccccaaagagggagtcacagccctggcttggggaactcccaggtctggcctccctgaagggacacagctcttctctcctcttcacccacaacacggtgaacaagggggcatgtttcatccctgtctgtgttacagctcttttagtcccaccatttgatgggtcccaagttcttgtcctgcaactggaaagaatgaggtactcagaaaagtggaaggtgagcaaggtgaagaggagctttactgagtgatagaacccctcagtctcctgcagggggcagctcctttccacagcctggctgtcccaacgagtgttcagctcctagcagagaggagactgtggaatcagaagctcctctctacaggcaggttgtcctgtcatctctgcagctctcagcagagaagaggccctggaatgggtagctcctctctgcagctggttgtctcaatgtctgcttgaatctcagcagagaggggccctgcagtgggtagctcctctcttcaactggtcatcccaacatctgcccagctctggcagagcctggggattttatgtgcctcagaggggaggaagtacatgctgattggtccatgggtggccatgggtgggcctggaaaaggcaccacaaattcccactcctgtctgcgggactggcagctcaccagggacccacccccttctgcccaggagcctgtctgcctcccactgccattcatggcacccaggctgttcatgccaaggggtgcctgaaggccagtgctgagctgccctcagcccccacttggctttcctcccatgctcgttggtgcccaaggtcccaaagggggccagggcagcagggggctggcgtgtctgcactgccctgagcatgtgcacacctggctgggctatgagagcgcctaggttcgggcctaggttcggccctgactttgctctgagattggatcaggtgccaaaagcagagagaagccaggcagtgggagcaggcatttctgagcctgtgaggacaggggctccttctcgggccccccaaagtgcagggatgcctgggtccacagccacagtttgggagggtagggctcctgccagcaacatggagccggaggcctgagtctgcagccacaacttgggtggctgcggctgcacctggggagctcccacccccaccaacttggaagggacagggctcccacttgtcaccggcttcacagagtgtgcagccctggctgcacctccctgctgcagctgacatgatggcagcagccgctccagacaggccaccactgccatcaccactagtgaattttaccaaacattcaaggaagaaataataccaattctacatgaagtattctagaaaactgaagaagagggagcacctcctaactcattctatgaggtcagcattattctgataccaaaacctaacaaagacattacaagaaaagaaaaatacagaccaatattcctcatgaaatagatgcaaaaattcttaaccaaattttagcaaatttaatccaacaatatatattaaaagaataacatgttgtgaataagtggggtttagttcaggaaagtaaaattattttaacattcaaaaatcaatttataggccaggcatggtggctcacgcctgtaatcccaacattttgggaggccaaggtgggtggatcacttgaggccaggagttagaggccaccctggccaacatggtgacaccctatctctactaaaaatacaaaaattagccaggcttggtggcgggtgcctgtaatcccagcaacttgggaggctgaggcaggagaatcactcgaacctgggaggcggaggttgcagtgagccgagattgcaccactacactccagcccgggtgacagagtgagactccatctcaaaaaaacaaaaaaaaaaacaacaaaaaaaatcaatttatgtaattcttcatattaacagacaaaataaatatagatcatctcaatgacacagaagaagaatttggcaaaatttgacatccattcctgatataagcttttagcaatctaggaaaagaaggaaactccttcaataaaggccatcgtccttcctgataaagttaatctaccaaaacctacagctgacatcatttttttttttttttggtctgaggcagtttaactctcatcacccaggctggagtgcagtggcataatctcggctcactgcaacctccgcctcccaggttcaagtgattctcctgcctcagcctcctgagtagctgggattacaggtgtgcaccaccacacccagctaatttttgtatttttagtagagacagagtttcaccatgttggccaggctggtctcaaattcctgacctcaggtgatctgcctcggcctcccaaagtgctgggattacaggtgtgagcaaccgctcctggcctagctgacatcattcttaatggtgaaagactgaaagtttctcctcaagatcaggaacaagacaaggatatctcatcttaccacttctattcaacattgtatgtggccagtgcaacaagagaagaaggaaaaaaaggcatccagggggtagtggcaagcacctgtaatcccagctactcaggaggctgagtcaggagaattgcttgaacctgggaggtggaggttgcagtgagctgaggtcccgccactgcactccagcctgggtgactagagtgaaactccatctcaaaaataaataaataaataaataaataaataaataaataaataaataaaagaaatgagaggcaagaggcatccagattggaaaaaaggaaatggaactgtttttactcacagacaacaggattatctatgtagaaaatctgattaaatctatgaaaaaattagaataagtgaatttaacaaaattgtaggttgcatgattgatatgcaaaaaaatcgtatgtctatacactagcaattacaagttagaaactaaaagttttttaaaaaacaggccaggcatagtggctcatacctgtaatctcaggactttgggaggccaaggtaggcagatcgcttgaggccaggaattcaagaccagcctggacaacatggtgagacctggtctctacaaaaataaaaataaaaaaattagccaggtgtggtggcatgtgcctgtggtcctagcacttgagaagctgagataggaggattgcttgagcccaggaggtcgatgctacagtgagccgtgtttgtgccactgcactccagcctgggtgacagagtgagactctgtcaaaaaaaaaaaaaaaagcctacaaaaagacagtgtggtattggcaacaaaatagacaaataggtcaatggaacaaatagaccaacatacatatggattacttatttttgacaaagatgcaaaagcaattaaatagagagaggattgtcttttcaacaaatagtgctgggataattggattttatgtgcaaagcaaaaaaaggaatgttgatttattccttataccatatacaaaaattaactcaaaatggattatagacctaattataaaacctaaatttggctgggcatggtggcttatgcctataatcccagcactttgagaggctgaggcaggagaatcgctcgcgtccaagagttcgagaccaccctgggcaacatagtgagattctgtctccatgaaaaaaatttttaacttagactacggttgtagtggcatgtgcctgtagtcctagctacttgggaggctgaggcaggaggattgcttgggttcaaggttatagtgagctatgatcaagccactgcactccagtctgggtgacaaacaagaccttgtctctgaagagagcaacaacaatgaaaaacctaaaattataagcctgctagaagaacacagaggataaaattcttgtgatcttgagttacgcaatgactcctaaatataccaaaagatcatgagccataaaagaaaaatattgatcaattggacttcaccaaaataaaaaaactcctgctctttaaaaggcactattaaaagaatgaaaagacaagccacagactagaagaaatagtgtaaatcatatatctgataaagaacatgtattcaaggccaggagcagtggctcatgcctgtaatcccagcactttgggagactgaggcgggcggatcacctgaggttgggagttcaagaccgacctgaccaacatggagaaaccccgtctctactaaacatacaaaattagccaggtgtggttatgcatgcctgtaatctcagctacttaggaggctgaggcaggagaattgcttgaatccgggaggcagaggttgtggtgagccaagcatgccattgcactccagcctgggcaacaagagcaaaactcttgtctcaaaaaagaaaaaaataaataaaataaaaaacaaagaatatgtattcaaaatagataaaggaccaggtgtggtggatcatacctgtaatcctagcactttgggaggccaaggtgggcagatcacctgaggtcaggagttcgaggccagcctggccaacaacaaccgtctctactaaaaaaaaaaaaatacaaaaattagccatgtgtggtggtgcctgcctgtaattccagctacttgggaggctgtggtaggagaatcacttgaacccgggaggctgaggttacggtgagctgagatcgcgccattgcactccagcctgggcgacagagcaagactctgtctcaaaaaaacaaaaaacaaaacataaaacaaacaaacaaaaacaaatagataaagaactctcaaaacagcatggtactggtatcaaaacagagatatagaccaatggaacagaacggagccctcagaaataacaccacagatctacaaccatttgatctttgacaaacctgacaaaaacaagaaatggggaaaggattccctatttaataaatggtgctgggaaaactggctagccatatgtagaaagctgaaactgaatcccttccttataccttatacaaaaattaattcaagatggattaaagacttaaatgttagacctaaaaccataaaaaccctagaagaaaacctaggcaataccattcaggacataggcatgggcaaggacttcatgactaaaacactaaaagcaatggcaacaaaagccaaaattgacaaatgggatctaattaaagagcttctgcacagcagaagaaattaccatcagagtgaacaggcaacctacagaatgggagaaaatgtttgcaatctacccatctgacaaagggccaatatccaaaatctacaaagaacttaaacaaatttacaataaaaaaaaccaaacaaccgcaacaaaaagtgggcaaaggatatgaacagacacttctcagaagaagacatttatgcagccaacagacacaggaaaaaatactcatcatcactggtcatcagagaaatgcaaatcaaaaccacaatgagataccttctcacaccagttagaatgacgatcattaaaaagtcaggaaacaacagatgctggagaggatgtggagaaataggaacacttttacactgttggtgggagtgtaaattagttcaaccattgcggaagacagtgtggcaattcctcaaggatctagaactagaaataccatttgacccagcaatcccattactgggtatatacccaaaggattataaatcatgctactgtaaagacacatgtacacacgtttattgtggcactattcacaatagcaaatacttggaaccaacagaaatgtccatcaatggtagactggattaagaaaatgtggcacatatacaccaggaaatactatgcagccataaaaaaggatgagttcatgtcctttgcaggaacacggatgcagctggaaaccatcattctgagcaaactatcacaaggacagaaacccaaacaccacatgttctcactcataggtggaaattgaacaatgagatcatttggacacagggaggagaacatcacaccctggggcctgtcgtggggtgcggggcagggggagggatagcattaggagaaatacctaatgtaaatgatgagttaatgggtgcagcaaaccaacatgacacttgtatacctgtgtaacaaacctgcgcattgtgcacatgtaccctagaacttaaagtattaaaaaaaaaaactctcaaaatgcaataatgaaaaaacaagccatctaataataaaatgggcaaaagatccgaacagacccttcaccaaagaaaatatatggatggcaaataagcacatgaaaagacgcccaaatcattagtcatcagggaaatgcaaagcaaaaacacagtgagatacaaccacacaccagttagaatagctacaataaaaaggctggcttcccacaaactcaagaggctgagacagatcactacttgagcccaggagttggaggccagcctgggcaacatagcaagatcccatctcttaaaaaaaaaaaaaaggtctgtgcatgatgactcatgcctaatgcctataatctcagcattttgggagggtgaggtgggagaatcacttgagcccagaagttcaagaacaacctgggaaacatggtgatatcctatctctacaaaaataaaaataaaaaaattagccaggtgtggtggtgcacacctgtggtcccagatacttgggaggctgaggtaggaggattacttgagcccagaaggttgaggctgcagtgagctgtgttcatgccatggcactttagcctaggcaacagagtgagactctgtcccaaaaatgaaatgaattttttctttttttaaaaaaaggctgactgtaggttcacagagacagtttgatgagtaaatgaaagaatgaggcaataaatgaaccagagctcagtctcttgatgcccattttcagttcaaaactcacaaaagactgatatgcacaaccaattttattaatattcaacgtggatatgtctggctccctcgacagaaggcctccaaaatgttggtgaggatgtagaacaactggaactctcatactctaatgatgggaatgtaaaatgatgcaaccactgtggaaaacggataatttttaaaagttaaaaacacacctacctcatccagcgattccactcctaggtgcttcctcaagacaaatgaaagtatatatctacagaaagacttgtacacaggccaggcatggtggctcacgcctgtaatcccaacactttgggaggctgaggcaggaggatctcttgaggccaggagtcggagattatagtgagctatgattgtgccactgcactccagcctgggtgacagagtgagaccctgtctctaaatatatatagatatatatatatatagaaaagggccgggcgtggtggctcttgcctgtaatcccaacactttgggaggccgaagtgggcaaatcacctgagtctgggagttcgagaccagcctgaccaacatggagaaaccctgtgtctagtaaaaatacaaaattagccagatgtggtggcacatgcctgtaatcccagctactcgggaggctgaagcaggagaatcgcttgaactcaggaggcggaggttgcagtgagccaagattgtgccattgcactccagcctgggcaacaagagtgaaactccatctcaaaaaaaaaagaaaagaaaagaaaagaaaagaaaagaaaagaaggccgagtgcagtggctcacacctataatcccagtactttgggaggctgaggtgggtggatcacctgaggtcaggtcaggacttcgagaccagcctgccagcctggccaacatggtgaaaccttatctctactaaaaatacaaaaattagctgggcacagaggcgggtacctgtaatcccagctgcttgggaggtggagacaggagaatcgcttgaatccagaaggcaaagtttgcagtgagctgagattgcaccactgcactccagcctgggcaacaaaagtgaaactccatctcaaaaaaaaaaaaaaggaaaagaaagaaaagaaaacattaaaaaatgtttaaagagttgtacataaatgttcatagcagtcttatttgtaatagccacaactgggaataacccaaagttaatcaaaaggtgagtgaataggtgaatgcataagtgaagaatgcatctcttcagcctggaatgcataaacacatagtggtttatacaatggaatattattcaacaataaaaagagtattggacatgctacaacatggatgagtctcataatagttattttcagtgaaaggtgccagacaaaaactggtatatgctgtatgatcccatttatataacattatagaaaggtgcaaatgagtctatactgacagaaaatagatcagtggttgcctgagtatgggggtgaggatcaaggatgggtaagagggaggagttacaaaggggcacaaggaaacttttgagggtgatgggtttgttctcttgtattaactgtgacagttcatgggtgtgtatgtatgtcaacatttatgaaaatttttttgagacagggtcttgctccattacccaggctggagtacaatggtgcggtcacagctcactacagcctcgaattccccggctcacgcaatcctcccacctcaccctccctggtagctgggactataggcacgcaccaccacacctggctaatattttgtattttttgtagagatggggtttcgccatgttgcccaggcttgtcttgaactcctgggctcaagcaatcctcctgcctggaactcctgaagtgctggggttacaggcgtgagccaccacgctcggcgaaaatgtacacttcaaataggtgtagcgtgccaggtgcggtggctcacacctgtaatcccagcactttgggaggctgaggcgggtggatcacctgaggtcaggagttcaagaccagcctgggtaacacagtgagaccttgtctctaattcaaaaataaggtcgggcgcagtggctcatgcctgtaatcccagccctttgggaggccaaggcgggtggatcctttgaggtcaggagtttgagactagcctggccaatatggtgaaaccctgtctctactaaaaatacaaaaattagttgggcatggtggggggtgcctgtaatcccagctactacggaggctgaggcgggagaattgcttgaaaccaggaagtagaggttgcagcgagccaaaatggagccactctactgtagcctgggtgacagagcgagactccgtctaaaaaaataaaataaaataaaaaataaatacacatagcttattgtatttcaactatgcctcagtaaagctgtttttgaaaacctcattgaactagacacaagatctgtgcattttattgtatacaactacatatatgtatatatacaatatacatatgtacaaatatatatatatactgtatatagtatgtatacatacacacacatatatttacatatattcttttaaggtctcaagagaaatcacttctactttgaccttgagtggccctcagaatccctgtgatagccacctggcagtgcatctttgggctggtccctttcttctctgggaagcagtgtcctcttttgtcaaaagcctggctgtattctgaggtcatcgccagctctaacatctgtggttctgtgaacctaaggatgaaaaaaagagtcccctgcaaacagtgatggcagacagttaaaccaaaccagatttccagtccaaaccgtggggcccaacctgagccacttcaaattccattaatctatccctgcatgtttgcacagcaaaaaacctgttgttcttaaagtactgatcttggagctggagccagggaggctgggagctggcaaatacagacactggctacctgggttctcactccaggctgctctgctgatgtgagccaaaggaggagcctgcctggctgccctgggtcctgtgtctttctggaaccaccttattgagtgctgtttgggtggtcgctaaggcacctgctcctttctgaaaggaataaccaattaacaagaaagaaacaaacactggttcttctgcccaagccagccacctcctgtttacaggctgtggccctttggccagagccccagctctgtcttctagggagagctggctgaaaatgagtgagaaatgaccaggggtatggtggactctggatttgggtcctgggtctgcgtcttaaaagctgtgatcttaggcaagcagtttcatctctccctgcatctggggagtgtgaataaccaaaccaggtacctggagtggttgcaaggattacagaaaatgagatgccagagatacaacatacagaacttcccagtggcgcctggcatggactgaacactccctaaaccttgactatcaatattcattaaagccgctggcatggtacctggcacccttttcttctgcatgaagctttactgcttccaagtgacatttgcattctggagttcacttttcccctcagtaagaatttaagagggtctggcgctatttcttattcctggtgttcagaggacagccttctttgcagcccctcctcagaaggaggaatcaaatatatgtgttcctcctgctgaaaacctctgctggcagcctgcagccttcacagtcaagcgccctctctgctgccagggtccaagactctcccgacatccaggaactccctcagctgccaggtgccctccccacactacacccaccttgccttcctgcctggtggctgagcatctcttcactctggactgccctttccacgccccctgcctggctcattcctaatcacccttcaaggtcctgcttaggtatcacctctgctaggaagccttcccagacctcccgggacagcataaaactgaactaccatggtgtattagcctcttctcacactgctaataaacacataccgagactaggtaatttaacacagaaaaacaggtttaatggactcacagttccacatggctcgggaagcctcacaatcatggtggaaggcagaggaggagcaaaggcatgtcgtacagggcgccaggcaagagagcttgtgcaggggaactgcccttgataaaaccatcagatctcattggacatattcagtaccaggtgaacactatgtgggaaaccgcccccatgattcaattatccccacctggcttggcccttgacacatggagattattacacttcaaggtgagatttaggtagggacacagccaaactgtgtccagtattggtgggttcttggtctcactgacttcaagaatgaagccgcggacgctcgcggtgagtattacagttcttaaaggtggtgtgtccgcagtttgttccttctgatgttcggatgtatttggagtttcttccttttggtggattcgtcatctccctggcttagtagtgaagctgcagaccttcgcggtgagcttacaggtcttaagcctacatgtttggagttgttagttcctcccaatgggttcgtggtctcgctggcttcagaagtgaagctgcaaaccttcccagtgagtgttacagctcataaaggaagtctggatccaaaaaatgagcagcaccaagatttattgcacaaagcaaacaaacaaagcttccacctctgcaatggaaccccagcaggttgccactgcaggcttgagcagcctgcttttattctcttatctggccccacccacatcctgctgattggtccattttacagagagccgattggtctgttttacagagagctgattggtccgttttgacagggtgctgattggtgtgtttacaatccctgagctagacacaaaagttctccacctccccactagattagctagatacagagtgtggattggtgcattcacaaaccctgagctagacacagggtgctgactggtgtgtttacaaaccttgagctagatacagagtgctgattggtgtatttacaatcccctagctagacataaaggttctccaagtccccaccagattaactagatacagagtgtggattggtgcattcacaaaccctgagctagacacagggtgctgattggtgtgtttacaaaccttgagctagatacagagtgctgattggtgtatttacaatcccttagctagagataaagattctccaagtccccagcagactcaggagcccagctggcttcaccaagtggatcccgcaccgggccgcgggtggagctgtgtgccagtcctgcgccctgcgcacactcctcagcccttggtcaggttgatgggactgggtgccgtggagcaggggttggcactcgtacaggagactcaggccgcgcaggagcccacggcaggtggcgggggagactcaggcatggcgggctgcaggtgcggagccctgccctgaggtgaggcagctaaggcccggcgagaaatcgagcacagcgccagtgggccagcactgctgggaaatccagtgcatcctccgcagctactggcccaagtgctaagcccctcactgccccgggcttgtgggctggctggccgctctgagtgcggcccgccgagcccacgcccacccggaacttgcgctgacctgcaagcgccacacgcagccccggttcctgcccacgcctctccctacacacctccccgcaagccgagggagccggctccagcctcggccagcccagagaagggctcccacggtgcagcggcaggctgaaggctcctcaagcacggctagaatgggcgcggaggccgaggaggcaccgagagcaagcgagggcagcgagggctgccagcatgctgtcacctctcaaaaccatatcacatgggaagggcccagacttcagagttggcattcctggcgctgtcccccaccagtcacacaccatcaacaagctgccttgcctctctgagaggttttaggtcctctaaaaatagtacctacctcatagtgttgttgtgtggatgaaaggcaaagcccttacttaccatagtgctggttcattgtaagcgcttggcagatgctagctgtgtgcacctaagtacctggcttttagtccttgaccagctactgacatgctgagtggatgtggacaagtctgtcttagatttggtttccctattctgttaatgaagcatcttaagccccagaggcctgtggatggtttggggggtggggggtggggtaaattaatatgtagcccacagtgctggggcctctgggcttttttccagaaggcgctccaggctgcccactaaagaagcccaactgccacagcagcagaccctgcggggagctggacgctctgcagccgcctgagccgccatggctgacttggtatgagcaaacataggctcatgctctgatcttgcctggcctcctgtggccagtgctcaggacatgtcatttgagtgctgaaataaacctctggacctttctttttttttgtttttttttttgagacggagtcactctgtagcccaggctggagtgcagtggcgcgatctcagctcactgcaagctccgcctcctaggttcacgccattctcctgcctcagcctcccgagtagctgggactacaggcgcccaccaccacgcctggctaatacctctggacctttcttatccctcaaggacaaattcaaccccctttttcccttgagactggcatcctgctggagaaggcatggcccaaggcaggaggccaagagcgcactccttcccaggcatcctggactcgccatctttctcatcccccaccttactgtcccctgttccccacccataggagggctgaagacccatgagttctaccagtaaatagcccttgatc

SEQ ID NO: 199 - DNA, 466 bp, Homo Sapiens
  misc_feature (436)..(436): n is a, c, g, or t
gcggccgcactcagcgccacgcgtcgaaagcgcaggccccgaggacccgccgcactgacagtatgagccgcacagcctacacggtgggagccctgcttctcctcttggggaccctgctgccggctgctgaagggaaaaagaaagggtcccaaggtgccatccccccgccagacaaggcccagcacaatgactcagagcagactcagtcgccccagcagcctggctccaggaaccgggggcggggccaagggcggggcactgccatgcccggggaggaggtgctggagtccagccaagaggccctgcatgtgacggagcgcaaatacctgaagcgagactggtgcaaaagcccagccgcttaagcagaccatccacgaggaaggctgcaacagtcgcaccatcatcaaccgcttctgttacggccagtgcaactctntctacatccccaggcacatccggaaggagg

SEQ ID NO: 200 - DNA, 431 bp, Homo Sapiens
gggttcgcagccgtagccagatccgttgaaaggagtgcagagaggtctcattgcgctcccgaacagacctgacgtagatccgaagtggcccgcgccatctcaactatgaggggacacccgtaggcggcgggagagggacgccgcgaggagccaataaagctccgcaaccggaagtgtcttctgggaggggtcgtacccggaagtgtggcacctcccgggccgcacccggaagtgtgatgccaccgccgctacggggaagtaatggtatccggccaattgagattcggagttaaaacagggatgtgcagatggaggtcggaggagacactgctgccccggcccccgggggcgcggaggacttggaggacacgcagttccccagtgaggaagctagagaaggtggaggggttcacgcggtcccgccggatcca

SEQ ID NO: 201 - DNA, 434 bp, Homo Sapiens
ccggcagttgagatagacggttctcacttgcaagatccgatgagaaaagttccagaggtttttaagaaattggattaagctgggtccctaacttcaagacattctcattatgctccttctcacctttctttgttgctaattatggaagatagggtccatttcatcatagcctccttcccccgtgctccactacaatcgccgcattctttctagctgtcagctggtttcttcaaggctcctgcttaaagtccacacgttattatggccgaaagcaacctggtgcttcggcctggataagagccccttctgcatcttattcacagcttgcagcctcagcccctctgatgaggccctcaggggagaggtcattaccttgatcctgcaaacccagactcgttgagcagcaacgcaatcaccaccgtgcttatctcact

SEQ ID NO: 202 - DNA, 368 bp, Homo Sapiens
  misc_feature (368)..(368): n is a, c, g, or t
tctgtcacggggctggatgaggtcccgttcaaaggtgagaaagtgaagctggtgcggctgcggaatccgtggggccaggtggagtggaacggttcttggagtgatagatggaaggactggagctttgtggacaaagatgagaaggcccgtctgcagcaccaggtcactgaggatggagagttctggatgtcctatgaggatttcatctaccatttcacaaagttggagatctgcaacctcacggccgatgctctgcagtctgacaagcttcagacctggacagtgtctgtgaacgagggccgctgggtacggggttgctctgccggattggcccgcaacttcccagatacttttctggaccaaacccn

SEQ ID NO: 203 - DNA, 578 bp, Homo Sapiens
  misc_feature (445)..(445): n is a, c, g, or t
  misc_feature (578)..(578): n is a, c, g, or t
cggagcataaagttaaagaaagtgaactcccaggaaatacacatgctcccaatcaaaaaacaacggctggccaccttttttccaagaaagtaaataacggctttttaaaatttgtatgattataatatggggaaaggtgcattggttttataaaaaggcatttaaaacaaattatctttgttaattattttggggagtagttgggaaatggaaaggtgaattggctctagaggccctgtatgctagtatcattttcttttttaatttttgacttttcacaaatgagtaaataagagcaacctatttttcaagcagattgcacattttttgcagctttaatggaatattgggtgaattaagagggtaaaaaaagctattttcattgccacaaagtgccttggatgatgtatacctaataaagggttagatgatatttcacaaatanaatgttgttgccactaaaaagggggggccggtacccaattcggccctattagtgagtcgaataccaattaaattggcccgtcgtttaccacgctggacttgaaaaaacccctgcgtacccacttaaatggccn

SEQ ID NO: 204 - DNA, 469 bp, Homo Sapiens
gaagatacttttgttaacatttctgaaattcaactggaagcttcatgtgtcaggaacatcttggacaaaactttaagttgtgttgatataaatttacccaaagatgatgactttgattggataattagtaaggtctttttgttatttttcatcgtatcaggtattgttgatattagagaaaaaagtaggataacttgcaacatttagctctggaagtacctaccacattttagagatttaccgtttccatatatttaacattcctggttacataatggacatttgtcttttaatgttttttcaatgttttaaaataaaacattttgtcttctaaaaaaaaaaaaaaaaaactcgagggggggcccggtacccaattcgccctatagtgagtcgtattacaattcactggccgtcgttttacaacgtcgtgactgggaaaaccctggcgttacccaacttaatcgccttg

SEQ ID NO: 205 - DNA, 664 bp, Homo Sapiens
  misc_feature (5)..(5): n is a, c, g, or t
  misc_feature (582)..(582): n is a, c, g, or t
  misc_feature (627)..(627): n is a, c, g, or t
  misc_feature (640)..(640): n is a, c, g, or t
  misc_feature (653)..(653): n is a, c, g, or t
gcggnttgcagtgagccgagattgcgccactgcagtccgcagtccggcctgggcgacagagcgagactccgtctcaaaaaaaaaaaaaaaaaaaagaatcacaaggtatttgctaaagcattttgagctgcttggaaaaagggaagtagttgcagtagagtttcttccatcttcttggtgctgggaagccatatatgtgtcttttactcaagctaaggggtataagcttatgtgttgaatttgctacatctatatttcacatattctcacaataagagaattttgaaatagaaatatcatagaacatttaagaaagtttagtataaataatattttgtgtgttttaatccctttgaagggatctatccaaagaaaatattttacactgagctccttcctacacgtctcagtaacagatcctgtgttagtctttgaaaatagctcattttttaaatgtcagtgagtagatgtagcatacatatgatgtataatgacgtgtattatgttaacaatgtctgcagattttgtaggaatacaaaacatggcttttttataagcaaaacgggccaatgactagatacncatagggcatctgtgaatatgtttataagcagcattccagaaagnagtggggaataanttccagccaaaangggttggaagg

SEQ ID NO: 206 - DNA, 627 bp, Homo Sapiens
gtgactctagaggtatcccgtgatgttatcgcccaacacccaaggtagcagtgcagggatggtgccagttacagggacaactcagctctgaatgttacaaagggcacttcatggaccaccaccttttctctgcttgctctgtacccctaaagtactacaaggcatttttggttaataataatttgaatactatgtgatcttgtagattctactgcgtttggctagctaatgtctctaagtagcaagatgatttattttttctggacaataccaggactatatgctgatacaggactggcttgctctaaggatcagattttccagtgtaaaatatatactccttatagggttgtaagagcagaagcccttcatagcctgtttctttttgctctctcttcagccagcaattggcctggatctttgctggtagacacagggaatgttctccttgacgagtggttcccaccctggcagcctcagatcccaccatgttggcagggatgctgaaatccacctgcctattcagccttagtaaataacaaaaaatcacaagtggctctagcatatatgtattctatgatattgggactcgtgatataaataatacaaatgctttacatgcataat

SEQ ID NO: 207 - DNA, 207 bp, Homo Sapiens
tttttttttttttttttttttttttttttggtttttttttttaagggagaaccaagtttattaatgacagcctttattacaatcactctcaagtgtaaaaaataaagggggattaattaatatttaaaactcactcggacttgctgtttggcctttcaatggatgtgccaaagggcagggatcttgcctgattctgaatcaattggc

SEQ ID NO: 208 - DNA, 444 bp, Homo Sapiens
  misc_feature (343)..(343): n is a, c, g, or t
cgcccggatgtctataaaaatgtgcccggcggcaaagctgccgaaggggcaccgctgagctgccgagaggaagctcgctctgcccggctgccctcttgtagtccgccggcgaggggcagttctcggtgaggaggaagagagcagcggacggcacagcacccgcgcgggccctcccacaacagctccagctggcagcatcacttcccgccaatttatccaacttctgccaaggctctgaaatgccaacaacgtcgaggcctgcacttgatgtcaagggtggcacctcacctgcgaaggaggatgccaaccaagagatgagctccgtggcctactccaaccttgncggtgaaagatcgcaaagcagtggccattctgcactaccctggggtagcctcaaatggaaccaaggccagtggggctcccactagttcctcgggatctcaa

SEQ ID NO: 209 - DNA, 153 bp, Homo Sapiens
  misc_feature (120)..(120): n is a, c, g, or t
gtgtctcctccagtcgcaacggccagacctgacctgccagctccgggcgtggggtgaaatctcttgattcctagtctctcgatatggcacctccgtcagtctttgccgaggttccacagnccagcctgtcctggtcttcaagctcactgccga

SEQ ID NO: 210 - DNA, 3097 bp, Homo Sapiens
gacccgcgcgggatgtgaccccctgaccccctgcctggcctcccctgccccccagggggcccgcctttgcctgcttttgggggggggtggggaggggcgcgcggatcatggcattggagttcccgggcttgcagccgccgccgccgcctcgttcacgcaccccgagcgccccttcttcccagagcagcagcggagaaggcgaagcggccggcgggggcgaggcagatggggctcaaggcgcgcagggcggcgggggcggctggcggcggcggcgacgggggcggcggaggcggcggggcggctaacccagccggaggggacgcggcggcggccggcgacgaggagcggaaagtggggctggcgcccggcgacgtggagcaagtcaccttggcgctcggggccggagccgacaaagacgggaccctgctgctggagggcggcggccgcgacgaggggcagcggaggaccccgcagggcatcgggctcctggccaagaccccgctgagccgcccagtcaagagaaacaacgccaagtaccggcgcatccaaactttgatctacgacgccctggagagaccgcggggctgggcgctgctttaccacgcgttggtgttcctgattgtcctggggtgcttgattctggctgtcctgaccacattcaaggagtatgagactgtctcgggagactggcttctgttactggagacatttgctattttcatctttggagccgagtttgctttgaggatctgggctgctggatgttgctgccgatacaaaggctggcggggccgactgaagtttgccaggaagcccctgtgcatgttggacatctttgtgctgattgcctctgtgccagtggttgctgtgggaaaccaaggcaatgttctggccacctccctgcgaagcctgcgcttcctgcagatcctgcgcatgctgcggatggaccggagaggtggcacctggaagcttctgggctcagccatctgtgcccacagcaaagaactcatcacggcctggtacatcggtttcctgacactcatcctttcttcatttcttgtctacctggttgagaaagacgtcccagaggtggatgcacaaggagaggagatgaaagaggagtttgagacctatgcagatgccctgtggtggggcctgatcacactggccaccattggctatggagacaagacacccaaaacgtgggaaggccgtctgattgccgccaccttttccttaattggcgtctccttttttgcccttccagcgggcatcctggggtccgggctggccctcaaggtgcaggagcaacaccgtcagaagcactttgagaaaaggaggaagccagctgctgagctcattcaggctgcctggaggtattatgctaccaaccccaacaggattgacctggtggcgacatggagattttatgaatcagtcgtctcttttcctttcttcaggaaagaacagctggaggcagcatccagccaaaagctgggtctcttggatcgggttcgcctttctaatcctcgtggtagcaatactaaaggaaagctatttacccctctgaatgtagatgccatagaagaaagtccttctaaagaaccaaagcctgttggcttaaacaataaagagcgtttccgcacggccttccgcatgaaagcctacgctttctggcagagttctgaagatgccgggacaggtgaccccatggcggaagacaggggctatgggaatgacttccccatcgaagacatgatccccaccctgaaggccgccatccgagccgtcagaattctacaattccgtctctataaaaaaaaattcaaggagactttgaggccttacgatgtgaaggatgtgattgagcagtattctgccgggcatctcgacatgctttccaggataaagtaccttcagacgagaatagatatgattttcacccctggacctccctccacgccaaaacacaagaagtctcagaaagggtcagcattcaccttcccatcccagcaatctcccaggaatgaaccatatgtagccagaccatccacatcagaaatcgaagaccaaagcatgatggggaagtttgtaaaagttgaaagacaggttcaggacatggggaagaagctggacttcctcgtggatatgcacatgcaacacatggaacggttgcaggtgcaggtcacggagtattacccaaccaagggcacctcctcgccagctgaagcagagaagaaggaggacaacaggtattccgatttgaaaaccatcatctgcaactattctgagacaggccccccggaaccaccctacagcttccaccaggtgaccattgacaaagtcagcccctatgggttttttgcacatgaccctgtgaacctgccccgagggggacccagttctggaaaggttcaggcaactcctccttcctcagcaacaacgtatgtggagaggcccacggtcctgcctatcttgactcttctcgactcccgagtgagctgccactcccaggctgacctgcagggcccctactcggaccgaatctccccccggcagagacgtagcatcacgcgagacagtgacacacctctgtccctgatgtcggtcaaccacgaggagctggagaggtctccaagtggcttcagcatctcccaggacagagatgattatgtgttcggccccaatggggggtcgagctggatgagggagaagcggtacctcgccgagggtgagacggacacagacacggaccccttcacgcccagcggctccatgcctctgtcgtccacaggggatgggatttctgattcagtatggaccccttccaataagcccatttaaaagaggtcactggctgacccctccttgtaatgtagacagactttgtatagttcacttactcttacacccgacgcttaccagcggggacaccaatggctgcatcaaatgcatgcgtgtgcgtggtggccccacccaggcaggggcttcccacagcctcttcctccccatgtcaccacaacaaagtgcttccttttcagcatggtttgcatgactttacactatataaatggttccgctaatctcttctaggata

SEQ ID NO: 211 - DNA, 459 bp, Homo Sapiens
gcatctccagcagtgcgcgcgtgccgcccttgcgcacgccgatgatgatggtctgcggcaactgctgggcagagccgtttggggccacgccatcgcggacgtcatcctggagggtccccgctttccgcagaagctcctgctggcctagctcggcggggcgggaaggcactagctggggctgggccaccagcagcaccgcgcccaggagcagcgcggccatgctggacaccacggtggcttcactgggccgcgcgccgctgggtcatgaagtgccgcagcagggaagcctcctagtcagtggcacatgggcgtttcaggccttcaattactgagccgcgcctctgtccagcccgtccggcgccctaaataggctcctgggctgggccatgggcagcactgccgagcacccgcggcgggtagagcaagtttctggatggcccggggcaggcgggcggggag

SEQ ID NO: 212 - DNA, 441 bp, Homo Sapiens
aaaataagtaggaatgggcagtgggtattcacattcactacaccttttccatttgctaataaggccctgccagctgggagggaattgtccctgcctgcttctggagaaagaagatattgacaccatctacgggcaccatggaactgcttcaagtgaccattctttttcgtctgcccagtatttgcagcagtaacagcacaggtgttttagaggcagctaataattcacttgttactacaacaaaaccatctataacaacaccaaacacagaatcattacagaaaaatgttgtcacaccaacaactggaacaactcctaaaggaacaatcaccaatgaattacttaaaatgtctctgatgtcaacagctacttttttaacaagtaaagatgaaggattgaaagccacaaccactgatgtcaggaagaatgactccatcattt

SEQ ID NO: 213 - DNA, 3138 bp, Homo Sapiens
cgggtgccatgcagctttctctaatttgctctcagttcctggctatgaattgctaaactatcagtctcgcgctcaccgcccggctgaggaggtgaaagtttctccccaggaagataaaccgcaaaagacatatattgtgcatgatttgcgccttttctttggctttttctttctttcttcacccccccacccacttttttttttttttttttcaaaaagcagagagggaaaaacggagagtgaaggagcgaggaggcgagcgtgagagaaaggagagagagagaaaagaaagggcgaggggctagtggaggaaggaaggaggggcggctgcgcgaggcggagagagggcgaagcagtcgcggcactggcgctcacattcctctatgctacaaatccaggaggaagtttttttttagggggctgagatgctccatgcctttaaaagggcagccttgacgcgcggccctctcggcagagactgagcggcgagaaagtgcgagccgggccggcagaatctgcctggcgggcgctggagcctgcgttactcgcggcccgcagccgtccggctactttgcgtttggcccggccagcgccgcgcggcgcgcgcgcgccattgcctgcaggctaggacttcgcgaggtgggtcgactcaccctccctcctcctcttcttcctcctcttcctcctcctcttgttcctcctcctcctcccgattttccctcctcggctggcgagggtggggggggcgggggaggccggggctcgccccgagcagccacgatgctcctggacgccggcccccagtacccagcgatcggcgtgaccacctttggcgcgtcccgccaccactccgcgggcgacgtggccgaacgagacgtgggcctgggcatcaacccgttcgccgacggcatgggcgccttcaagctcaaccccagttcgcacgagctggcttcggccggccagacagccttcacgtcgcaggcgccaggctacgcggctgctgcggccctgggccatcaccatcacccgggccacgtcggctcctattccagcgcagccttcaactccacgcgggactttctgttccgcaaccggggttttggcgacgcggcggcggcagccagcgcacagcacagcctctttgctgcatcggccgggggcttcgggggcccacacggccacacggacgccgcgggccacctcctcttccccgggcttcacgagcaggctgccggccacgcgtcgcctaacgtggtcaacgggcagatgaggctcggcttctcgggggacatgtacccgcgaccggagcagtacggccaggtgaccagcccgcgttcggagcactatgctgcgccgcagctgcacggctacgggcccatgaacgtgaacatggccgcgcatcacggcgccggcgccttcttccgctacatgcgccaacccatcaagcaagagctcatctgcaagtggatcgagcccgagcagctggccaaccccaaaaagtcgtgcaacaaaactttcagcaccatgcacgagctagttacgcacgtcaccgtggagcacgtaggtggcccggagcagagtaatcacatctgcttctgggaggagtgtccgcgcgagggcaagcccttcaaagccaaatacaaactggttaaccacatccgcgtgcacacgggcgagaagccctttccctgccccttccctggctgtggcaaggtcttcgcgcgctccgagaatttaaagatccacaaaaggacgcacacaggggagaagcccttcaagtgcgagtttgagggctgtgaccggcgcttcgctaacagcagcgaccgcaagaagcacatgcacgtgcacacgagcgacaagccctatctttgcaagatgtgcgacaagtcctacacgcatcccagttccgtgcgcaaacacatgaaggtccacgaatcctcctcgcagggctcgcagccttcgccggccgccagctctggctacgaatcctccacgcctcccaccatcgtgtctccctccacagacaacccgaccacaagctccttatcgccctcctcctccgcagtccaccacacagccggccacagtgcgctctcttccaattttaacgaatggtacgtttaaaatcagaaacaaaacatcgaacaaaaccctatttaagagacttgatcacacacgtatacacaacattactgaaagaaccctgcgaatcaaaacaacccccacacagaccccgcaatcctcttttaaaaaatctgccaatagacccaggacgagtaagagaggaagcatcaaccttttaaaaatttcctttcgctttcattatttttctttttttggcaaaggcttggtacccaaggtgcggtagggggtcgagggggaggaggccacctgaccaaatgccgccaaccccgagggccagtttcttgtcgaattggtacgggctctctggggcttcggcttctttttttctttgttttcttgtaaatacagaattattagcttaaaactgtactgttgaattctgtaaatagttatatctcggttggagcgggtgggtgggattgtggcgttgtggtctttgcattgggggaggggggagggaccggatgggcggggggagggggagggggaggggtgggcggccgaaagccaactgtttgtactgaatggcaagaatgttctagtaaatgtgtaccaaaatgtgaattactttgtacgattacagtctccacgtcgacctaacccaatattattggtattaatgtgctttttttgtataaagtgcaaacatttcgtcccaaagtctaagtactttagtgcagtaaaatgttgtttcatgtcctgtcaagaattcgtatagtacgagcctggatctgcgtgtcaaactgttccatttgtttatgtaaagtgatattaaaaaagatataaactataactgtccgttacttttggcaaaagatacaaccacataatgtatataattcctagtttccatatttatccgcatgtaaagggccggtttatccatgttacagctcttcaatatttatggctagaagaactcgtatgtacactttagtttccagaactgtttggtaacctttcgtaccttattaaagattcttaaatctcaaa

SEQ ID NO: 214 - DNA, 356 bp, Homo Sapiens
ggcacgagcggcacgatccaccgacgacctcactcagctgcgttacgcgccgctccggctgccggccgcgcgccttgcccgccggctcccgcccgcaatcggcggctcagggcggacccgggtctctgcgttctcgcgagaagcgcggcgctgcggggccgtgggcgcctgagcccgcgcggccctcgagggccgaatatggggggatgcacggtgaagcctcagctgctgctcctggcgctcgtcctccacccctggaatccctgtctgggtgcggactcggagaagccctcgagcatccccacagataaattattagtcataactgtagcaacaaaagaaagtgatggattcca

SEQ ID NO: 215 - DNA, 205 bp, Homo Sapiens
aagtacatcccttaggtgtataccttcccttttgcttagggcaacagttaagataaactaatacacgtatatgattttaagagttaaaaactcatcacccataatcaataaggatgctaaggaatggcaataccttgaagctttttttaaaattaaaaaccaaagctttagatggtaaactacacttacagaaacacaaaccaaa

SEQ ID NO: 216 - DNA, 652 bp, Homo Sapiens
ttgaaatggtcagaggagaaattgaaaatttattcatcaagaaaataattataaatagcatagctggatctataatttagctcagtagagtggactgcaaaatagatgcttaccatttggttgatagaggaagaaaaatagctatatcctattacagttgacccttgaacaacaagggcttgaattgcaagggtccacttatacatgaatattctttcccccactccccacacccctaagacaagactgcaagaccaacgccttctcttcctccccatctttctcctcctctgcctactcaatgtgaagacaatgagaatgaagacttttatgttgacccacttccatttaatgaatagtaaatatattttctctttcttatgattttctaaataacattttctctagcttactttattgtaggaatatagtgtataatacatataacacgcaaaatatgtgttaatttactgtttatgttatcagtaaggtttatggtcaatagtaggctattaggtagttaagattttgcgcgaccccgaattgtcagctcccctaacccccatggttcaagggtcagctgtagatggtagtagatgggccaacaagttcatttcaaatatattccaatattcgtaatctttggagagag

SEQ ID NO: 217 - DNA, 401 bp, Homo Sapiens
  misc_feature (24)..(24): n is a, c, g, or t
  misc_feature (328)..(328): n is a, c, g, or t
  misc_feature (337)..(337): n is a, c, g, or t
  misc_feature (362)..(362): n is a, c, g, or t
  misc_feature (372)..(372): n is a, c, g, or t
tgatcaatagccttttgtcttcangtgaagttcctggactctatactcttgaagaattagagccttgctgttaccacttaaggatcaagcttcacaagatggtttttttggaccagtcttcaattacttcacatatagaattcagcaaaacttgcatattgtcttgataatggattctgcaaattcaaacttcatgataaactgtgagagtaatccagctttgcataagaatgccaggtgttgtggatggagggttggtccaatagcagtatgaagaaatacctgaaatgttaatcagtggaacaggtggtggaggaaaataccatgntaaaaaacngaaaggaggaaaggaaaaaaattcnggttgatccnggattttcctaaaaaccatttttattaat

SEQ ID NO: 218 - DNA, 201 bp, Homo Sapiens
  misc_feature (17)..(17): n is a, c, g, or t
  misc_feature (37)..(37): n is a, c, g, or t
  misc_feature (51)..(51): n is a, c, g, or t
  misc_feature (53)..(53): n is a, c, g, or t
  misc_feature (126)..(126): n is a, c, g, or t
  misc_feature (184)..(184): n is a, c, g, or t
gccttataggtggcaancgctggtgagaaacaccttncgcaggtaaaaggntngcggcgagagggagttcccacccgtggctttcttagagaaatgaagtcttaagtcttaaatagacaacaaggnggggccgatcggtgtcttttggacgcgtctggagcccctccctccgccaaaggaaaanccccttggatgagaggc

SEQ ID NO: 219 - DNA, 189 bp, Homo Sapiens
  misc_feature (16)..(16): n is a, c, g, or t
  misc_feature (26)..(26): n is a, c, g, or t
  misc_feature (45)..(46): n is a, c, g, or t
  misc_feature (58)..(58): n is a, c, g, or t
cgtaatggaaactgcncaaaaagagngcgtctgactgtagtccgnnagaaaggtttgngcttttagaggaggaggagaaaatgcagagggtacagggcttgtaaatgctctaattttaaaactgacggtaagttatgccatttccctctaacaaaaatgaggtaggattcgctattttcaaggtaaaaa

SEQ ID NO: 220 - DNA, 356 bp, Homo Sapiens
agagcatagtctgaagtttatgatttatgaactgtttacagatatgatcttatcaaccgtttcaagattcctgtttcttgcctaatcacctttgcagaagctttagaagttggttacagcaagtacaaaaatccatatcacaatttgattcatgcagctgatgtcactcaaactgtgcattacataatgcttcatacaggtatcatgcactggctcactgaactggaaattttagcaatggtctttgctgctgccattcatgattatgagcatacagggacaacgaacaactttcacattcaggcaaggtcagatgttgccattttgtataatgatcgctctgtccttgagaatca

SEQ ID NO: 221 - DNA, 291 bp, Homo Sapiens
  misc_feature (207)..(207): n is a, c, g, or t
  misc_feature (223)..(223): n is a, c, g, or t
  misc_feature (233)..(233): n is a, c, g, or t
  misc_feature (275)..(275): n is a, c, g, or t
acttttttgctgcctctgaaatgcacaggctctcgcacaccaagaagggttccactgaccgccccggatcagggatctgtttccatttcagctggccccttcctccctcccaccttctcctgtctccttcccagggactgaagaactaaaatacatacagttaccagattacagccccgtctagtacgattgtatttctctggtaangaaaatagaattcacntgtcttgaanttctttagaacttccttaggacctattttcataagaatcganggtagtggaagaatct

SEQ ID NO: 222 - DNA, 457 bp, Homo Sapiens
ttttaatgacaaagacatggctttaatgttatccaggagacatctgattcacatagggttactgaacactagaatctgatcttgaatctctcatgtcaacaacagacaaatgcattacaatttagggacagctgttttctgggtacctcccaggtgtttgcagaagaaggctagaatttgcttccaggcatcttcctgggccttagaatgagccctgggctccccaccccatataacatgtttgttcagtaatctgtgaagggaagctgggcacagggggaagtaaggaggctcgatgtaatgcccagtcccagggtaacagatgatctggggtttttcctttccatgggcctgtaaccgttcagagactgtttgggcatacaactcacttctccagttatggtcatcctgaccaacaatgagcaggatgggcccctgggccttctctattggaatc

SEQ ID NO: 223 - DNA, 8684 bp, Homo Sapiens
gagctgccacttttcaccgttagaagtagagctttttccagacctcctaccttttagtctactttgaaaggtgaaagaaagaacatcgtttcaggaataaaaatgcacagtagtagttatagttaccgtagcagtgattctgtgtttagtaacactaccagcactcgaaccagtcttgattcaaatgaaaatcttctcttggttcattgtggtccaacactgatcaactcttgcattagcttcggtagtgaatcctttgatggacacaggttagaaatgttgcaacagattgccaacagagttcagagggacagtgtcatctgtgaagacaaactgattcttgctggaaatgctcttcagtctgattctaaaagattagaatcaggagtgcagtttcagaatgaagcagaaattgctgggtatatacttgaatgtgagaaccttttacgccagcatgtaattgatgtacagattcttattgatggaaaatactaccaggcagatcaattggtacagagggttgcaaaactgcgtgacgaaattatggccttaaggaacgaatgttcttctgtgtacagcaaaggacgcatactgacaacagaacagacaaagctcatgatatcaggaatcactcaaagtttaaactcaggatttgcacagaccttacaccctagtctgacctcagggctgacccagagtttaacaccttccctaacctcttctagtatgacttctggcctgtcatcagggatgacttcccgcctgactccatctgtcactccagcttatacacctggtttcccatcaggattagttccaaatttcagttcaggagtagagccaaattcattgcaaactttgaagttgatgcagatccgaaaaccccttctaaagtcttctttgctggatcaaaatttaacagaagaagaaatcaatatgaaatttgttcaggatcttttgaattgggttgatgagatgcaggtacaactggaccgcactgagtggggctcagatttgccaagtgttgaaagccatttagaaaatcataaaaatgttcatagagctattgaagaatttgaatctagtctcaaagaagctaaaatcagtgagattcaaatgacagcacctcttaaactgacttatgcagaaaagttgcacagattagagagtcagtatgcaaaactcttgaatacatccaggaatcaagaacggcaccttgatacactccataattttgtaagtcgtgcgactaatgaacttatttggttgaatgaaaaagaagaggaggaagttgcttatgactggagtgagagaaacaccaacatagctaggaaaaaagattatcatgctgaattaatgagagaacttgatcaaaaggaagaaaatattaaatcagttcaggagatagcagagcagctacttctagaaaatcatccagcccggttaactattgaggcctacagagcggcaatgcagacgcagtggagctggatcttacagctctgccagtgtgtggagcagcacataaaggagaacacagcgtatttcgagtttttcaatgatgccaaagaagctactgattacttaaggaatctaaaagatgccattcagcggaagtacagctgtgatagatcaagcagcattcacaagctagaagaccttgttcaggaatcaatggaagagaaagaagaacttctgcagtacaaaagcactatagcaaacctaatgggaaaagcaaaaacaataattcaactgaagccaaggaattctgactgtccactcaaaacttctattccgatcaaagctatctgtgactacagacaaattgagataaccatttacaaagacgatgaatgtgttttggcgaataactctcatcgtgctaaatggaaggtcattagtcctactgggaatgaggctatggtcccatctgtgtgcttcaccgttcctccaccaaacaaagaagcggtggaccttgccaacagaattgagcaacagtatcagaatgtcctgactctttggcatgagtctcacataaacatgaagagtgtagtatcctggcattatctcatcaatgaaattgatagaattcgagctagcaatgtggcttcaataaagacaatgctacctggtgaacatcagcaagttctaagtaatctacaatctcgttttgaagattttctggaagatagccaggaatcccaagtcttttcaggctcagatataacacaactggaaaaggaggttaatgtatgtaagcagtattatcaagaacttcttaaatctgcagaaagagaggagcaagaggaatcagtttataatctctacatctctgaagttcgaaacattagacttcggttagagaactgtgaagatcggctgattagacagattcgaactcccctggaaagagatgatttgcatgaaagtgtgttcagaatcacagaacaggagaaactaaagaaagagctggaacgacttaaagatgatttgggaacaatcacaaataagtgtgaggagtttttcagtcaagcagcagcctcttcatcagtccctaccctacgatcagagcttaatgtggtccttcagaacatgaaccaagtctattctatgtcttccacttacatagataagttgaaaactgttaacttggtgttaaaaaacactcaagctgcagaagccctcgtaaaactctatgaaactaaactgtgtgaagaagaagcagttatagctgacaagaataatattgagaatctaataagtactttaaagcaatggagatctgaagtagatgaaaagagacaggtattccatgccttagaggatgagttgcagaaagctaaagccatcagtgatgaaatgtttaaaacgtataaagaacgggaccttgattttgactggcacaaagaaaaagcagatcaattagttgaaaggtggcaaaatgttcatgtgcagattgacaacaggttacgggacttagagggcattggcaaatcactgaagtactacagagacacttaccatcctttagatgattggatccagcaggttgaaactactcagagaaagattcaggaaaatcagcctgaaaatagtaaaaccctagccacacagttgaatcaacagaagatgctggtgtccgaaatagaaatgaaacagagcaaaatggacgagtgtcaaaaatatgcagaacagtactcagctacagtgaaggactatgaattacaaacaatgacctaccgggccatggtagattcacaacaaaaatctccagtgaaacgccgaagaatgcagagttcagcagatctcattattcaagagttcatggacctaaggactcgatatactgccctggtcactctcatgacacaatatattaaatttgctggtgattcattgaagaggctggaagaggaggagattaaaaggtgtaaggagacttctgaacatggggcatattcagatctgcttcagcgtcagaaggcaacagtgcttgagaatagcaaacttacaggaaagataagtgagttggaaagaatggtagctgaactaaagaaacaaaagtcccgagtagaggaagaacttccgaaggtcagggaggctgcagaaaatgaattgagaaagcagcagagaaatgtagaagatatctctctgcagaagataagggctgaaagtgaagccaagcagtaccgcagggaacttgaaaccattgtgagagagaaggaagccgctgaaagagaactggagcgggtgaggcagctcaccatagaggccgaggctaaaagagctgccgtggaagagaacctcctgaattttcgcaatcagttggaggaaaacacctttaccagacgaacactggaagatcatcttaaaagaaaagatttaagtctcaatgatttggagcaacaaaaaaataaattaatggaagaattaagaagaaagagagacaatgaggaagaactcttgaagctgataaagcagatggaaaaagaccttgcatttcagaaacaggtagcagagaaacagttgaaagaaaagcagaaaattgaattggaagcaagaagaaaaataactgaaattcagtatacatgtagagaaaatgcattgccagtgtgtccgatcacacaggctacatcatgcagggcagtaacgggtctccagcaagaacatgacaagcagaaagcagaagaactcaaacagcaggtagatgaactaacagctgccaatagaaaggctgaacaagacatgagagagctgacatatgaacttaatgccctccagcttgaaaaaacgtcatctgaggaaaaggctcgtttgctaaaagataaactagatgaaacaaataatacactcagatgccttaagttggagctggaaaggaaggatcaggcggagaaagggtattctcaacaactcagagagcttggtaggcaattgaatcaaaccacaggtaaagctgaagaagccatgcaagaagctagtgatctcaagaaaataaagcgcaattatcagttagaattagaatctcttaatcatgaaaaagggaaactacaaagagaagtagacagaatcacaagggcacatgctgtagctgagaagaatattcagcatttaaattcacaaattcattcttttcgagatgagaaagaattagaaagactacaaatctgccagagaaaatcagatcatctaaaagaacaatttgagaaaagccatgagcagttgcttcaaaatatcaaagctgaaaaagaaaataatgataaaatccaaaggctcaatgaagaattggagaaaagtaatgagtgtgcagagatgctaaaacaaaaagtagaggagcttactaggcagaataatgaaaccaaattaatgatgcagagaattcaggcagaatcagagaatatagttttagagaaacaaactatccagcaaagatgtgaagcactgaaaattcaggcagatggttttaaagatcagctacgcagcacaaatgaacacttgcataaacagacaaaaacagagcaggattttcaaagaaaaattaaatgcctagaagaagacctggcgaaaagtcaaaatttggtaagtgaatttaagcaaaagtgtgaccaacagaacattatcatccagaataccaagaaagaagttagaaatctgaatgcggaactgaatgcttccaaagaagagaagcgacgcggggagcagaaagttcagctacaacaagctcaggtgcaagagttaaataacaggttgaaaaaagtacaagacgaattacacttaaagaccatagaggagcagatgacccacagaaagatggttctgtttcaggaagaatctggtaaattcaaacaatcagcagaggagtttcggaagaagatggaaaaattaatggagtccaaagtcatcactgaaaatgatatttcaggcattaggcttgactttgtgtctcttcaacaagaaaactctagagcccaagaaaatgctaagctttgtgaaacaaacattaaagaacttgaaagacagcttcaacagtatcgtgaacaaatgcagcaagggcagcacatggaagcaaatcattaccaaaaatgtcagaaacttgaggatgagctgatagcccagaagcgtgaggttgaaaacctgaagcaaaaaatggaccaacagatcaaagagcatgaacatcaattagttttgctccagtgtgaaattcaaaaaaagagcacagccaaagactgtaccttcaaaccagattttgagatgacagtgaaggagtgccagcactctggagagctgtcctctagaaacactggacaccttcacccaacacccagatcccctctgttgagatggactcaagaaccacagccattggaagagaagtggcagcatcgggttgttgaacagatacccaaagaagtccaattccagccaccaggggctccactcgagaaagagaaaagccagcagtgttactctgagtacttttctcagacaagcaccgagttacagataacttttgatgagacaaaccccattacaagactgtctgaaattgagaagataagagaccaagccctgaacaattctagaccacctgttaggtatcaagataacgcatgtgaaatggaactggtgaaggttttgacacccttagagatagctaagaacaagcagtatgatatgcatacagaagtcacaacattaaaacaagaaaagaacccagttcccagtgctgaagaatggatgcttgaagggtgcagagcatctggtggactcaagaaaggggatttccttaagaagggcttagaaccagagaccttccagaactttgatggtgatcatgcatgttcagtcagggatgatgaatttaaattccaagggcttaggcacactgtgactgccaggcagttggtggaagctaagcttctggacatgagaacaattgagcagctgcgactcggtcttaagactgttgaagaagttcagaaaactcttaacaagtttctgacgaaagccacctcaattgcagggctttacctagaatctacaaaagaaaagatttcatttgcctcagcggccgagagaatcataatagacaaaatggtggctttggcatttttagaagctcaggctgcaacaggttttataattgatcccatttcaggtcagacatattctgttgaagatgcagttcttaaaggagttgttgaccccgaattcagaattaggcttcttgaggcagagaaggcagctgtgggatattcttattcttctaagacattgtcagtgtttcaagctatggaaaatagaatgcttgacagacaaaaaggtaaacatatcttggaagcccagattgccagtgggggtgtcattgaccctgtgagaggcattcgtgttcctccagaaattgctctgcagcaggggttgttgaataatgccatcttacagtttttacatgagccatccagcaacacaagagttttccctaatcccaataacaagcaagctctgtattactcagaattactgcgaatgtgtgtatttgatgtagagtcccaatgctttctgtttccatttggggagaggaacatttccaatctcaatgtcaagaaaacacatagaatttctgtagtagatactaaaacaggatcagaattgaccgtgtatgaggctttccagagaaacctgattgagaaaagtatatatcttgaactttcagggcagcaatatcagtggaaggaagctatgttttttgaatcctatgggcattcttctcatatgctgactgatactaaaacaggattacacttcaatattaatgaggctatagagcagggaacaattgacaaagccttggtcaaaaagtatcaggaaggcctcatcacacttacagaacttgctgattctttgctgagccggttagtccccaagaaagatttgcacagtcctgttgcagggtattggctgactgctagtggggaaaggatctctgtactaaaagcctcccgtagaaatttggttgatcggattactgccctccgatgccttgaagcccaagtcagtacagggggcataattgatcctcttactggcaaaaagtaccgggtggccgaagctttgcatagaggcctggttgatgaggggtttgcccagcagctgcgacagtgtgaattagtaatcacagggattggccatcccatcactaacaaaatgatgtcagtggtggaagctgtgaatgcaaatattataaataaggaaatgggaatccgatgtttggaatttcagtacttgacaggagggttgatagagccacaggttcactctcggttatcaatagaagaggctctccaagtaggtattatagatgtcctcattgccacaaaactcaaagatcaaaagtcatatgtcagaaatataatatgccctcagacaaaaagaaagttgacatataaagaagccttagaaaaagctgattttgatttccacacaggacttaaactgttagaagtatctgagcccctgatgacaggaatttctagcctctactattcttcctaatgggacatgtttaaataactgtgcaaggggtgatgcaggctggttcatgccactttttcagagtatgatgatatcggctacatatgcagtctgtgaattatgtaacatactctatttcttgagggctgcaaattgctaagtgctcaaaatagagtaagttttaaattgaaaattacataagatttaatgcccttcaaatggtttcatttagccttgagaatggttttttgaaacttggccacactaaaatgtttttttttttttacgtagaatgtgggataaacttgatgaactccaagttcacagtgtcatttcttcagaactccccttcattgaatagtgatcatttattaaatgataaattgcactcgctgaaagagcacgtcatgaagcaccatggaatcaaagagaaagatataaattcgttcccacagccttcaagctgcagtgttttagattgcttcaaaaaatgaaaaagttttgcctttttcgatatagtgaccttctttgcatattaaaatgtttaccacaatgtcccatttctagttaagtcttcgcacttgaaagctaacattatgaatattatgtgttggaggaggggaaggattttcttcattctgtgtattttccgg

SEQ ID NO: 224 - DNA, 487 bp, Homo Sapiens
  misc_feature (452)..(452): n is a, c, g, or t
  misc_feature (466)..(466): n is a, c, g, or t
  misc_feature (477)..(477): n is a, c, g, or t
  misc_feature (486)..(486): n is a, c, g, or t
ttgacttttgaaattcctgctttctcagagtttacaacatccttaccaaacagccttctccctccttaccacaaaaaaagaaaaaaaaagttctggggttgaggggacactccattcttaacatcctctattatcccagcccaattccccagctctcactgggactagttgtacctatcttcatcatttggtcccagcatgactacctgttggtgcatgagctgatctctcctaacctaacagccagatgctagtctctggtactcagatgctgggctgcatcagataggatgcacaggatcatcctgggaagcttgttgacatagattcctgtgcaacacttcagatatagtcttaatgtagatttgtgttggggtggtatggtaggtagaataatgggcctaccactgtgtaaacatatggatatgtttacctaacatgacagaagaganttaagttgctaatnagatgactgtnaaataaatna

SEQ ID NO: 225 - DNA, 584 bp, Homo Sapiens
  misc_feature (424)..(424): n is a, c, g, or t
  misc_feature (444)..(444): n is a, c, g, or t
  misc_feature (470)..(470): n is a, c, g, or t
  misc_feature (509)..(509): n is a, c, g, or t
  misc_feature (525)..(525): n is a, c, g, or t
  misc_feature (544)..(544): n is a, c, g, or t
  misc_feature (581)..(581): n is a, c, g, or t
ggataaccttcaacaatgaggctttgctaagtggccagacttgggatttgatcttcctcacttgttatttattaagtttaagccttattcagtatctctaattgcaatagatatagttcctgtgacttctaaaaaaaattcctgttaatgctgagacagtatcttttttgtcagtttattaatttttggtcaagatttagcctgagtcttaaagcatttatttgtggaatgccccactgaaagtgtcttctccattggctaagtacatgtttaaagccatgggttttaatgtaagatactttcagtatctaattctgtttcccccactggagggtgctaaagagaattagaatctttactaaagacatgctccaggaaaagcttcacgagagaacagcttcaaaatcctccctaatgacactgnatgggtagtgaggaaagaantcctgggggatgcccagttacatacnatagccctaatactgctaatcactggtcaataaaaaggncacttcattcacctcnaatttgagggaaaccatgnggaaggtatcctgatgactagatccctgtcagtattnggg

SEQ ID NO: 226 - DNA, 3481 bp, Homo Sapiens
aagtaacgccgcggaccgggaaagtgggaggggccgctcccggaacgcagccttcttgtaagaacctccaaggaagcaagaagaaaaaagaggcgctaccctgcgctcccgggaggcctctgaaagcttccactagagaaaaactccccactcttacaatttctttaaccgcaagaagcggaggacctggacaaggactcgaggagcaaggtggcgaaccaagggtagggcgcaccgggcccgagaggtcccccgcaggttgcagatacggtggactctctgcggcttctgagcacggagggagctgtcgcggggtcgggaggtcgtctctcatccctgcctcatcttccgacggccggcggggccatgtccagaggcccgagctccgcggtcctgcctagcgccctgggatcccggaagctcggcccccggagcctcagctgcctgtcggacctggacggcggcgtggccctggagccgcgggcctgtaggccccctgggagcccgggccgcgcgccgccgccaacgccagcgccgtcgggctgcgacccccgcctgcggcccatcatcctgcggcgggcgcgctcactgcccagctcccccgagcgccgccagaaggccgcgggcgcgccgggcgctgcgtgtcggccgggctgcagccagaagctccgcgtgcgcttcgccgacgccctgggcttggagctggcacaggtcaaggtgttcaacgcgggagacgacccgtccgtgccgctgcacgtgctgtcgcggctcgcaatcaactcggacctgtgctgcagcagccaggacctggagttcaccctgcattgcctggtgcccgatttcccgccgcccgtcgaggccgccgactttggcgagcgcctgcagcggcagctcgtgtgcctggagcgtgtcacttgctcggaccttggcatcagcggtacggtgcgcgtgtgcaacgtggccttcgagaagcaggtggctgtgcgctacactttctcgggctggcgcagtacccacgaggcggtggcgcggtggcgcgggcccgcaggccccgagggcacggaggacgttttcaccttcggctttccagtaccgcccttcctgctggagctcggctcccgcgtgcacttcgcggtgcgctaccaagtggcgggtgccgagtactgggacaacaacgaccaccgagactacagcctcacatgtcgcaaccacgcgctgcacatgcctcgcggggagtgcgaagagagctggatccacttcatctgagccgcgcggggaccggccacctggagcctccacacctaagctgcgcctcctgtcatttccctgctgggctctcacatctatctggttgttcttcaccaccctccaagtcctctgacctaattttctgctgcaaggtcccctggcagtggcccatcctgtcttctacttgaaacgtctgagtcacttggtctaaaaagtagcctcaggtggccagaaggccgagttgtgtaatgagttggggcagggtggtggggtaggtgcatgggagggtgggccctctggggaggcccaagcagcttgttttgcaaaggcccaagtcctcctgctaggaaaagcttttgcatgtgtcctgaatgtgtctctgtaaacatagctgttatttattattgtgatgttgggacctttagcccatagcggatgcctcctcaggaatattctcgatttaataagctaaaaaaaaaaagttctgtgtttgtgcccacagtaaacagaatgtacagtgtgacccacatcgtggtccctccaggcattcctgccccaggataaggaaaacctgagcccacatctgattgccaacggctgtagccttctaacagtgggaaactattaataggcaagaaatttctgctttatcagtcatcacacaaccattcctgggcattgagactgtcctggttaggctgtgtgtctcctacattaacagctggggaggagggaaaagcttcagacttttaaactagcaaaacagttatttctctgcattcacaattctgatttcatgtatttctctgtacatgtttgatcattatcaggccattctgtttaagtttgaaactaagcattttaagaagtcttgcctcagttatttcagttttcaggtgactagagaatttcaggcaacagtgccctttgcaattacctttttgatgattaaggtgactatttttatttcttgttaagcatcagaagatgtcagcattcatcttttgggagtccagttacaaggtggaactagaaggtgttttcagcaatagccagagcactggaggaaaaataattgacaaatatttatacttttaaattgttttgaactgtatttacatacatcatgttttatcaggtacccaccaactttatactttctgccttcagatagagtttctaacattttctagtttgtcagttttaaaatataaaattcttttatgtttttaaaccgtcaaccaagaagtcaagaccactgtcccctgctgagttaggcaatcacttaaaactccaaagaactccaggctgaggagttcttttggtgctgaacagtggtctgacaacaggtgctagaattaaggtgtgggaaaaaaaaaaaaacagccaggaaggacaagatctccaatttgtgaagcttatgatacagctgaaaccagtctgatcaattttatgctacctgtcaccaagaaattaactctaaatttttgaatgcttgttggcatctgtcaaatcaatactgaaaggatgcatttcggcttttaaccagtttggttctgatcattgcaacctctgtgcttttataattcaaagaacaaggatagctttcttcggtatcttttaatataagaacactgaattttggcttgaaatattgtgactaaattgcacaatctctggctattagcactgttcactacattaacatgcaagagagagagaagccttgttacatttcctgctatttaacaaactgtccaattaggtcagcaagcctgttagggccttcactgctacgcccctggccccaaaacagagagcaagacagttgtccagagaatttagatatgagttaagagctgccagatttattttaaggcatgtagagaatctcataatctatgtgaaagtcacttgccaaaaaggttttggttatgaaagtgaatgttatatatttaatattaagtgaacctcccgtgccttttaaaaaataccaacattatgaaatttaaaagcttaaatatatttgcctagttgataaagaggctgtggaacaactgaaggagaactttcagaccctaaaacagttatattacttagatgttaaaattttctagtgggctgtgcaattgctgggttgtccccccaaacatattttaatatgttatttaaaatgattttacccaagcctaagtattaaagtatatgtgcaaaaacaaaaaaaaaaaaaaaa

SEQ ID NO: 227 - DNA, 204 bp, Homo Sapiens
tttttttttttttttctgcaactattttttattaactttactgtttgcattaaaaagacagcacttttcgggtacagttagatagtccaattcaacagtaagaaccattttaactcctaaaactgaacaactgtattagttatgaacactatatacaagtcatgaaaccccagcttgaatttacttaggcaaaaagagatttta

SEQ ID NO: 228 - DNA, 7522 bp, Homo Sapiens
cccgggcgagcccgccgtgcgcacagctctgcccgccgcccctggagcggatccccagccgtccctgggcgttctcccgggttctagcaaagccccccggggtgcccatcagtttccttgggtgactacagcgtgtgttttttctttcctctttcccctgcctgtgtgcccttctccaggatggcagaggcggaattgcacaaggaaaggctgcaagccatagcagaaaaaagaaagaggcagactgaaatagaaggcaagcgacaacagcttgacgagcagatacttctgctgcagcattccaagtccaaagtgcttcgggagaaatggctgctgcagggcatacccgctggaactgccgaagaggaggaagccaggaggcggcagtctgaagaggatgagttcagagtcaagcaacttgaagataacattcagaggctggagcaagaaatacaaacgctagaaagtgaagagtcccagatatctgccaaagagcaaatcatcctagagaaactgaaggaaacagaaaaatccttcaaggactttcagaagggtttctccagtacggatggagatgcagtaaattacatttcctcccagcttcccgacctgccaatcctctgttcacgaacagcagaaccatcacctgggcaggacgggaccagcagagcggctggagtcgggtgggagaatgtgctgctaaaggaaggtgagtcagcctcgaacgccacagaaacatccggcccagacatgactatcaagaagcctccccagctttctgaggatgatatctggctaaaaagcgagggagacaactatagtgccaccctcctggagcctgctgccagctctctttccccagatcacaaaaacatggaaattgaggtgtctgttgcagaatgtaaaagtgttcctggaatcacctctaccccacatcccatggaccatccctccgctttctattcacccccgcataatggcctccttactgatcaccacgaatccctggataatgatgttgccagagagatccgctatctagatgaggtgctagaggccaactgctgtgattctgctgtggatggaacgtacaatggaacatcctccccagagcctggtgcagtggttctggtgggcggcctaagcccccctgtccacgaggcgacccagccagaacccactgaaagaacagctagccggcaggcacctcctcacatcgagctcagtaatagcagccctgaccccatggcagaggcagaaagaacaaatggccattcccccagccagcctagagatgcgctgggggacagcctgcaggtgcctgtcagccccagctccacaaccagctcacggtgttcttcccgagatggagagttcactctcaccacactgaaaaaggaggccaagtttgagctgcgtgccttccatgaggacaagaagccctccaagctctttgaggatgacgagcatgagaaagaacaatactgcattagaaaagtgaggccttcagaggagatgctggagctggaaaaggagaggagagagctcatccgcagccaggccgtcaagaagaatcctggcattgcagcaaaatggtggaatcccccgcaggaaaaaaccatcgaggagcagctggacgaggaacatctggagtcgcacaaaaagtacaaggagcgcaaagagagaagggcacagcaggaacagttgctgctgcagaagcagttacagcagcagcagcagcagcccccatcgcagctctgcacagcccctgcctcttctcatgaacgcgcaagcatgattgacaaagcaaaggaggacattgtcacagagcagatagatttctctgctgctcgcaaacaatttcagctgatggagaattccaggcaagcggtggccaagggccagagtacacccaggctgttctccatcaagcctttctacaggcctctggggtcagtcaactcagacaagccactgactaatccgagaccaccttctgtcgggggacctccagaagacagtggtgcctcagccgccaagggacagaaatcccccggtgccctggagaccccatcggcagcaggaagccagggcaacacagcctctcaggggaaggaagggccctacagcgagccttctaaacgtgggcccttatctaaactgtgggctgaggatggagaatttacgagcgcccgggctgtcctcactgtggtcaaggatgatgaccatgggattttggatcagttctcaagatctgtcaatgtctccttgacccaagaggagcttgactctggtctggacgaattgtcggtgaggtctcaggataccacagtcctggagaccctatccaatgatttcagcatggacaacatcagtgacagcggggcatccaatgagacaaccaatgccctccaggaaaattcactggctgatttttctctgccccagacaccacaaactgacaacccctcagagggccgaggagaaggcgtctccaagtcatttagtgatcatggtttctattccccttcctccacgctgggggactctccgttggttgatgaccccttggagtatcaggctggcctcctggtgcagaatgccattcaacaagccatagccgagcaggtggataaagctgtgtccaaaaccagcagggatggagcagagcaacagggacctgaagcgactgtagaggaagctgaagctgcggctttcggctcagaaaagcctcagagcatgtttgagccacctcaggtgtcttctcctgttcaagagaaaagggatgtattaccaaagattctgcctgctgaagacagggcgctcagggaaagggggcccccccagccactgccagctgtgcagcccagtggcccgattaacatggaggagaccaggcccgaaggaagctatttcagcaagtactcggaggcagctgagctgagaagcacagcctccctcctggccactcaagaatctgacgtgatggttgggcctttcaagctgaggtccaggaaacagcggactttgtccatgattgaggaagagatccgagcagctcaggaaagggaagaggagctgaagaggcagagacaagtcttgcagagtacgcagagccccaggacaaagaatgccccatcactgccctccagaacatgctacaaaactgctccagggaaaatagagaaagtcaaacctcctccatcccccaccactgaaggccccagcttgcagcctgacttagcccctgaagaggctgccggaacccagcggcccaagaatctgatgcagaccctcatggaagactatgagacacacaaatctaaaaggcgcgagagaatggatgatagtagttacacttctaagttactgtcttgcaaggtgacttccgaggtcctcgaggccacacgggttaatcgaagaaagagcgcactggctttgcgctgggaagcagggatctatgccaaccaggaggaagaagacaacgaataaacttccttcaacccaggaagcgtctttggtgcttgggagaccaagaaaccaagaaattaacaactgaaagcattttaatggactatttattaaagtgcaaacaaactcagcaatccttatgtagaccagaagctgcaatatacaatgatgaaaatgaaacgaaaaggaagtccccccatcagactctggacacccaggaatcaaaagagaaaggacttttttggtgactcaatcccagtgtctggtttggggccaatctacaatggatccaaaaggacaaaacatgttacaagcaaatcaacatagttgctgcaggcggaactgagaccagcctctctgggcgatgaaggacaatggtggtagggccacttagagagcagtagggcccaggctggtgcagcctacatggcacaggatatttccctgcaccagtttcccacctgtcacttgcagcatcagagggtgttgcattaactccattttctccagcagccataaaatgaatggcgtttctctccatatttgcccagaagaggcagttatgattccacttctcctacatttaattatttttaattgagaacaactcatgatcacaattcataaaatccatattttaagacaatagttcttcatgtcacaaacacaatctattctacatgaggaggctgagaaaggggaagagaaaaacaaaccaaatggatgatgttagctttaggatcgtgtctgcttataatattcactgatctgcagtttatgagaacacattttcacagttatgtttcttcataggaaaactatatttagtgggcaacaactatttttatgatgggatgggggagtatatacacgtatagaatctgtacgcgttgaacaacttggttcaagatggtgggggcatttttagagcggcaataattgaaaaaaaaggcgaactctgccttggagaggtagatgataagaaataaaaaggtgtttataactattttgtattataaagtgggccttagagataggaagaagaatgatggattccttttggatcaatcagaaaggaaacacgaaagaaaagtcaggaaggtagagagagaaaaagggagggaaggagaaagaatgggaataaaataaggaggtaagagatactatttttgctgagcaaccagtgtgtttcaggatgatacaaagaaaaatatagaatagaaataagtgcaggcttggaatcagctacaaatcctaaagatggggtgtgtgtggatgtgtgtgtgtgtgtgtgtacaccattgtgtgtttgtaaaatgtgtatgttcatgagtaagggtgtgtgtgtgtgtgtattaaaattccagagtgaccgtggcacttgggtgtacaggtaattcctccagagctgtttgctggcttcaggagtggagtgagaatttcttttttatgaaaagggatataaaggcaccgagctgatgcagtatttgtaatattaagttgacctaacaaggtatttgcatgagtcacaattacaaagttttgagcggttttgtaatttgacatttaggagagtctcctatttattctcatactttacattcatgcttagtatactatagaggatgccagctttaatctttctgtcatttaaagcaatatgataagggtattcaataattgggtgccctaaatttctggatgagaaaattttcaattctggccatgagaaagaaaaaaaaataaacagccttctttttttttcctttgttttaaaactgtggttttttaaaaaagcaataattaactcagacctcactaaaaatcatttttgtttttatattgttatgtcataagctctattatgttattctaacaagtagcaatttcacaaaatttgtatgtagatgttaacgcacatttcctttgcttcttttattagactagtgttgactttggggggggacatttattcacaaatgagaagtaggcacaaagtaaaaaatggaaccatctactaacaaggatcctttaaaactgccaagggagctctaacttgaagccacatcctacagatggcagcccaaatagcacatgggcaattggcaccatctttatatggttgagtctcctgaatattttgaatgaattctcaacaaaatgtgctagccactggggacgcaaaacaagtaagatccctgttgcaagaaattcattttatagtgagggaggttggcatggagactaaaattctcaggaaaatgagatccgtgttagattagaagtcctgatgtgaaatgggaggactcaggaaggaggatcgtctttacctgaggatttctagccagaggtcccagatgcctgggctgagaacccagcgataagggggcgttcccaaagcagacacagggataagaacagaggaggcagcagcattgcacagccccaggcacagtggcagttaggatggctggagagtaggatagttctatgggttgcccaaaaaatgtgatgcgcttcatgttttctctgactcatggatctggtagagaccatagacatgatatagactaacttccccatttttcacaagaggaaaccatccttatgacttaccttaaagttttttgttctgttttgaaggaaaccatgtgcttcatgaaacctacagttgacaagagaatgtacagctaagagaaaagcttaagaggccacactattcgcggaatggctttagaggcagatgaagtggtctttgaccacagttgattgaaccagagcacttattgcttaaagaataacagagttctagagctgggggttcttgggccatgctccgtgtgtggataaggaaagaaatactgtttctgggactctcccacagtcacaaagctgttttcactgtggcccctacatctcttaacttttgctattactcctatgctgccttccggattactgctgtctatcttcttgctccactcactgaagatcctattataatcccatgaaaatgtaaattacagtttacttgggagagccagattttctctgtgctcttgagttttttattcattcaagaaaccttgggccaccgctttgtacatagcaccgtgctaggctctgggatcccaaatggacccttttaactttctgaagatgggaccgtcccctggaggaaagtcattcctgcctaatccatcgagagaaagaggcttacgaaaaactttgcctctgatgctcagccccacccccaaatagcacacaagcttgttaaccccacctcttacaaaatgtttagattctgtaggtgttaaaagcctttctggaagtattgcattctgccgtgtttataggtgttcactttcctccagagctgattaactactgacatgacttggctttctcatccagaaattatggaaacagggtctgtcagtggcaggaggccgtgctgtgttttacttggatgacacaatgcagtttacttgcctcttcatacccatgcatgctgctcaccctagacaatgacatataagccgtatatagatcaatgtccacatatatatacacacacacatatatatatataaagtgtaacaaggaacactaaaacagtgttgattcttgtctctgaagacaaataattaaaccttttttttcccaactaaagaatggatttaattaaactatgtattgaaaaaaaagtagcctaagtgttagagatggtgaatatattccattttagttaaagaacaaatttcctgaattttaagcattcagtgagctgccaattttgattttgtgttgctctttacccaaattattttttctttgtttttctttttttgggggaggaggggaaaaaagcagcaatactgtgtttggaaattatactctgtatctggttttcctgtgtatgttaaccacttaaatgttattatcctgctttggttttagagtgattgtgaggcattcaatgcaagtatacagttattttctcattaaaatccaatgtgtgttgagtttttataaaaaaaaaaaaaaaaaa

SEQ ID NO: 229 - DNA, 233 bp, Homo Sapiens
  misc_feature (15)..(15): n is a, c, g, or t
  misc_feature (105)..(105): n is a, c, g, or t
ctctcctcgactgtnaagcgggccgggacctgccaggccagaccaaaccggacctcgggggcgatgcggctgctgcccctgctgcggactgtcctctgggccgcnttcctcggctcccctctgcgcgggggctccagcctccgccacgtagtctactggaactccagtaaccccaggttgcttcgaggagacgccgtggtggagctgggcctcaacgattacctagacattgt

SEQ ID NO: 230 - DNA, 186 bp, Homo Sapiens
ttctgtgacacccaatccccacatttaaaatagaatgtttggtttatttaaagtaaataggctattttttcttactgggtctggcttctctggcccttcgcatacgtgtgtctgctgagtgttcctgcatgtaagaattaagaccaatggaggggagagagaaacccacacatgggtagtcacaga

SEQ ID NO: 231 - DNA, 307 bp, Homo Sapiens
  misc_feature (95)..(95): n is a, c, g, or t
ctccggccccgcggagacggagcggcttgaggacgaggcggcggccgcggggaggaggatgggggctaaccagttagtggtgctcaacgtgtacnacatgtattggatgaacgaatatacctcatccattggaattggagtttttcattcaggaattgaagtctatggcagagaatttgcttatggtggccatccttaccccttttctggaatatttgaaatttccccaggaaatgcttctgaacttaggagaaacatttaaatttaaagaagctgttgttttagggagcacggacttcctagaaga

SEQ ID NO: 232 - DNA, 411 bp, Homo Sapiens
cgggccgcagcgatccaacacatatgtgatcaagctgttcgaccggagcgtggacttgggccagttcagcgagaacacgccactgtacccaatctgccgcgcctggatgcgcaacagcccctctgtgcgcgagcgtgaatgctctcccagctcacccctgcccccgctgcctgaggatgaggagggctcagaggtaaccaacagcaagagtcgtgatgtgtacaagctgccgccacccacacccccggggccacccggagatgcctgcagatcccgcatcccatctccactgcagcctgagatgcagggcacccctgacgatgagccctctgagcccgagccctcaccctccacactcatctatcgcaacatgcagcgctggaaacgcatccgccagaggtggaaaggagc

SEQ ID NO: 233 - DNA, 436 bp, Homo Sapiens
  misc_feature (14)..(14): n is a, c, g, or t
  misc_feature (17)..(18): n is a, c, g, or t
  misc_feature (54)..(55): n is a, c, g, or t
  misc_feature (400)..(400): n is a, c, g, or t
  misc_feature (414)..(414): n is a, c, g, or t
  misc_feature (425)..(425): n is a, c, g, or t
tctggcggcggcanatnngcggcgggggcggctgaggcagctgtagcgaccgtnngaggaggtcggctcagccggcagtttgaggagctgctgcgcctcaaagccaagtccctccttgtggtccatttctgggcaccatgggctccacagtgtgcacagatgaacgaagttatggcagagttagctaaagaactccctcaagtttcatttgtgaagttggaagctgaaggtgttcctgaagtatctgaaaaatatgaaattagctctgttcccacttttctgtttttcaagaattctcagaaaatcgaccgattagatggtgcacatgccccagagttgaccaaaaaagttcagcgacatgcatctagtggctccttcctacccagcgctaatgaacatntttaaaggaagttntcaaccttcgnttgtaggaaat

SEQ ID NO: 234 - DNA, 646 bp, Homo Sapiens
agtaatgcacctttctcttataagtagattttattttttaaaataagaacttggcattgaaacatgaaacttgagttttgaaaactaccctccaagatgctgaagtatgtttactttttctttgtaaaagggggcttaacctatgtttcctgaaggtctaagtctgtgcagataaattatatgacatgtatctgtttttaaaacactctatatgctggtactcacatagaaatagaagccagaatgagaagcctcccaaattatcccatcctgacagcccttccctttttcatttcctgtttatgataaggcaaagttcttgcctggaagcacaatttaaccccttttaccaaaaccaaatccaaatctctttggaggaaaaatccctaaaagaactggcagggtacacatgctgggatgtgggtatgtcaatactgttcttcctcacagtatgctgttttaaaattatttttttaaaaaaggtcaggtattgatgtatcttcagaaaaatacccaccctaaactaggttacatttccatgtatcttcaggatttgtttttctcttggacaatattacaatgctctgtttgaaaggtttttggtttttttttgacataaaaatttttgggtaaaccctggggccga

SEQ ID NO: 235 - DNA, 343 bp, Homo Sapiens
  misc_feature (9)..(9): n is a, c, g, or t
  misc_feature (220)..(220): n is a, c, g, or t
  misc_feature (252)..(252): n is a, c, g, or t
  misc_feature (254)..(254): n is a, c, g, or t
  misc_feature (315)..(315): n is a, c, g, or t
ttttttttnttgcaagtctgatgagacacacatctcataaattctcagacactctcagcttttcctcccgtagcacttattacacaacccagcctgtcagtaagtctgtgtctccctctagactcaaaggctctgtgcaggcggagactgaggtcattaaacgttgtctctccccagccacttgcctagcacctgatgctcagtaagtacctaaccagantagatgaggcagcaagagaatggcgctcggtntntggggtaaggggagtcaggaggaggacgggctgctcgtgagacagggtagggatggggctntgctgggtttcctctcaagcccccaggg

SEQ ID NO: 236 - DNA, 5646 bp, Homo Sapiens
agaagaggaagattagaagatttttttttttctttgagagaaagcccagcggagataaacgaatgtcccctcatctccaaagaaaagttcatcggatttttattctagagagctcatcttcaggatgtcagtgaacatttctactgcaggaaaaggtgtggatccaaatacagttgatacttatgacagtggcgatgattgggaaatcggggttggaaatttaataattgatttggacgctgatttggagaaggacagacagaaatttgagatgaataattccaccaccaccactagtagcagcaactccaaggattgtggaggtccggcctccagtggggctggtgctaccgcagccttagctgatggcctaaaatttgcttctgttcaggcctctgctccccaggggaattcacacaaagagaccagcaaatcaaaagtgaaaaggagtaaaacttctaaggatgctaataaatctctgccttctgctgccttgtatgggattcccgagatcagcagcactggcaagaggcaggaagtccaagggcgccctggagaggcaactggcatgaattcagcgctgggtcaaagtgtgagcagcggcggcagcggcaacccaaacagcaatagtaccagcaccagcacctctgccgccaccgcgggggcaggctcctgtgggaaaagcaaagaggagaagccaggtaaaagccagagcagccgaggcgccaagcgggataaggatgcggggaaatccaggaaggacaagcacgacctgcttcagggccaccagaatggcagtggcagccaggccccttccggggggcacctctatggctttggggccaagagcaatggaggtggcgcgagccccttccactgcgggggcactgggagtggcagcgtcgccgctgcaggggaagttagcaaaagtgccccggattcagggctcatgggaaactctatgttggtaaagaaggaagaggaggaggaggagagccacaggcgaatcaagaaactgaaaactgagaaggttgaccccctgtttacagtgccagcgccaccaccgccgatttccagcagtctcacgcctcagattctaccctcctacttttccccatcttcatccaatattgcagcaccggttgaacagcttttggttcggactcgttctgtgggtgtcaatacatgtgaagttggagtagtgacagagccagagtgtcttgggccctgtgaacctgggaccagtgtgaatttggaagggatcgtgtggcatgaaacagaagaaggtgtcctagtggtcaatgtcacgtggaggaacaaaacgtacgtgggaaccctactggactgcaccaagcacgactgggcccctcccaggttttgtgagtcaccgacaagtgacctggagatgagagggggccggggcagagggaagagagcaaggtctgctgctgctgccccgggctccgaggccagcttcacagagtccagagggctgcagaataagaacagagggggggccaatgggaaagggaggcggggcagcctcaatgccagcggacgaaggacacccccaaattgtgctgctgaggatatcaaagccagcccttcctccaccaacaaaaggaaaaacaagcctccaatggagctggacctgaactccagctctgaggacaataagcctggaaagcgtgtccgcacaaattccagaagcactcccactacccctcaagggaaaccagagactacttttttggaccaaggctgctcttctccagtgttaatcgactgtccccacccaaactgcaacaaaaagtacaagcacattaacggcctgaggtaccaccaggctcatgcacacttagacccagaaaacaagctggagttcgagcctgacagtgaggacaagatctcggactgtgaggaaggattgagtaatgtggcacttgaatgcagtgagccaagcacaagtgtatctgcttatgaccagttgaaggcaccggcatcccctggtgctggaaacccacctgggaccccaaagggaaagagagagctgatgagcaatggcccaggttccattattggtgctaaagctgggaagaattctggcaaaaagaagggccttaacaatgaactgaacaaccttccagtaatctccaacatgacggctgcgttagacagttgctcggcagcagacggcagtttggctgctgagatgcctaaactggaagcagaaggattaattgacaagaaaaatttaggagataaagaaaagggcaaaaaagctaacaactgcaaaacggacaaaaacctctctaaactgaaaagtgcccggcccattgcccctgccccagcccccactcccccgcagctaatcgctatacccactgcaacctttacaacgaccaccactgggacaatacccggactgccctccctcacaacaactgttgttcaggctacaccaaagagtcctccgttaaaacccattcaaccaaagcccacaattatgggagagcccatcaccgtgaacccagctctggtgtcactcaaagacaaaaagaaaaaggagaagcgaaagctaaaggacaaagaagggaaagagacgggaagcccaaaaatggatgccaagctggggaaactagaggactccaagggggccagcaaagatttacctgggcattttttaaaggatcatctcaacaagaatgaagggctggcaaatggactgtcggagtctcaggagagccgcatggccagtatcaaagctgaggccgataaggtttacactttcacagacaacgctcccagcccttccatagggagcgcctcgaggctggaatgcagcactttggtgaacgggcaggcaccaatggcacctctgcatgtgttgacccagaatggggcagagagttcagctgcaaagacaagcagcccggcctattcagacatatctgatgctgctgacgatggtggttctgacagcaggtcggagggtatgagatcaaaggccagttccccatcagatattatttctagtaaggacagtgttgtaaaagggcattcttcaactacagcacaatcatctcaactgaaagagtcccattctccctattaccacagctatgatccttattattctccaagttacatgcaccctgggcaggtcggtgcccctgcagctggaaatagtgggagcacgcagggaatgaagatcaagaaggagtctgaggaagatgctgaaaagaaagacaaggcagagcagttagattctaagaaagtggaccacaattctgcatccttacagcctcagcaccagtcggtgatcacacaaagacatcctgccctggctcagtcactttattatggccagtatgcatatgggctctatatggaccagaagtctctgatggccaccagccctgcctatagacagcagtatgagaagtactatgaggaccagaggctggcagagcagaaaatggcccagactgggagaggagactgtgaaaggaaaagtgagctccccttgaaagagctgggcaaggaggaaactaaacagaaaaatatgccatcggccacaatctcaaaagctccctctactccggagcctaacaaaaaccattctaaactagggccatcagtgcctaataaaactgaggagacaggtaaatcgcagcttctctccaatcaccagcagcagcttcaggccgacagcttcaaagctaagcagatggaaaaccaccagcttattaaggaggctgtagaaatgaagtctgtcatggactctatgaagcagacaggtgtagacccaacctcgagatttaaacaagacccagattcaagaacatggcatcattatgtataccagcccaaatatctggatcagcaaaagtcagaagaacttgatagagagaagaaattaaaagaggatagtccgaggaaaactcctaataaagagagtggtgtgcccagccttcctgtatcgttaacaagcattaaagaggagcccaaagaggccaagcatcctgattctcaatcaatggaggagagcaagctgaaaaatgatgatcgaaagactcctgtgaactggaaggactctcggggaacaagagtggctgtctcctcacccatgagtcagcatcagtcatacatacagtacttgcatgcttatccttacccacagatgtacgaccccagccatcctgcataccgggctgtttctcccgtcctaatgcacagttatcctggggcatatctctctccaggatttcattatcctgtttatgggaagatgtcagggagagaagagacagagaaagtcaataccagccctagcgtcaacacgaaaacaaccactgaatctaaagcactggatttgctccagcagcatgctaaccaataccgcagcaagtctcctgctcctgtggaaaaggctacagctgagcgggaacgggaggcagaaagggaaagggatcgccactcccccttcggccagcggcacctgcacacgcaccaccacacccacgttggcatgggttacccgctaatcccgggtcaatatgacccttttcaaggcttgacctctgctgcccttgttgcctctcagcaggtggctgcccaggcatctgcatctggaatgtttcctggacaaagaagagaataacaagattggacatgtacattgtcatgtgactggatcacatggggaagcgctttatacagacatcagttccatggtgttaatttgaaatgccttaatggcaggcaaaaaccagtcatttcatttttgtaaattacagattttatcacagagtaacaaatgttgctgtaattaaacttctgttttatatatatatacgtatacatatctgtatatatacatatatatatatataaatataaatatattctttactttttgtatcagtaaccaggctcgcacacacagggtctgctgccacgtcgcaaaccactcagtaaaggaaattaaaaatgtatttgtcatgttaaaaagtgttagccacaaaaggctacttactttcttttccttttcctttaaaattgtaaataaataatgttatgtatcagtgtgcctgaaccttgcatatccttcacatatttcccataagcccctcagaaaggctaactgtgatgatgacactttggtacaatttagatgtctatttggtggctcctgttaaagacgcaccagtgtaaaatgttcctgtagtcactgtttgtacttgtgtattgtggaaaaagtacttttggaaggcatggggttgccagtaccacaaaaactgtgttgtatataatgtaaagattaaaatggggaaataatgagcatctgtgaataatgaggtgtcattttttgataatcttgaatggcaaataacccaatagcctgcgtaccagagacatctgtgattgttctattacttgaatagttctacagtctttttttttttttaatgtttacaattatccagttttagaagagagagactttaacgccattgcctggttacttgttttatgctgtaatctagtttattttatgtaaaatgtatattgaatgctttccttttttatacctgccttaaataatttggcaatcagaattaaaaagtttttttttttttaaat

SEQ ID NO: 237 - DNA, 447 bp, Homo Sapiens
cgacccggcccagtgcgcagggggtgaaagttgaactaataaagtttgtacgagttcagtggaggagaccgcaagttgagtggaggaggcggcggtggggccccggaccaggtgcctccatggcaggctctgaagagctggggctccgggaagacacgctgagggtcctagctgccttccttaggcgtggtgaggctgccgggtctcctgttccaactccacctagaagccctgcccaagaagagccaactagacttccgtgagccagccttcgaagaatgtcttccgctgctcccatggggcataggagcagcccccgtctgagtcccctcggccttgctctctgcccatccgcccctgctatggtttagagcctggcccagctactccagacttctatgctttggtggcccagcggctggaacagctggtccaagagcagctgaa

SEQ ID NO: 238 - DNA, 597 bp, Homo Sapiens
ggtggaggcggagggaggcggcggcggcggcggcgggaagatggcggctcccgtcctgctaagagtgtcggtgccgcggtgggagcgggtggcccggtatgcagtgtgcgctgccggaatcctgctctccatctacgcctaccacgtggagcgggagaaggagcgggaccccgagcaccgggccctctgcgacctggggccctgggtgaagtgctccgccgcccttgcctccagatggggtcgaggatttggtcttttgggttccatttttggaaaggatggtgtattaaaccagccaaacagtgtctttggacttatattttatatactacagttattacttggcatgacagcaagcgctgtggcggctttgatcctcatgacgtcctccatcatgtcggtcgtggggtccctgtacctggcctacattctgtactttgtgctgaaggagttctgcatcatctgcatcgtcacgtacgtgctgaacttccttcttctcattatcaactacaaacgactagtttacttgaacgaggctggaagcggcagctgcaacccaagcaggactgacgcccgacagactccacctaacagtcc

SEQ ID NO: 239 - DNA, 234 bp, Homo Sapiens
tttttggctggaaattagatgaccaagctcggaacggagcatcagggccctcgtttgtaagcttagttttcttttattcccaacaaattccatccttttatcactgggtattagcaagtcaggtcagaactattcattatttttggccaaagacattcccactaaagaagggacacagtgtggtaaaatacattctagagataagatgaggcagagtgcgagtgagtttgctga

SEQ ID NO: 240 - DNA, 485 bp, Homo Sapiens
attcttgggccataccccagggttactgaatcagaaacttggttggggcctagcagtgttttcatgagccctccattgatcttgatgcagctgaagtgccgggcaccagtgaaagggaagggctgcggtagtgattccattgattcctgctttgatggaagttatggcctcacaggttagacgttgcaagttgagttggccctcttgcctaggtgtgcctccttgccttgggattctgacatgaacaggtgaagtctcttcatgattttttttgttgctgttgttaatggtatgcttgctattatggccaatatgtaaatgttactctgaatacatatttatataccatgttacttagtgacattattcaaacatttgtatgcgtatttgtgaaattgtttgcatcagtcatttaaaaaatatttcagcctaagttttctaagaggtatgttgaatacatttttaaaagccaacttaagggtaac

SEQ ID NO: 241 - DNA, 257 bp, Homo Sapiens
acaatggctatggaatgaaagatgcagagaaacactgctttaaagagtatgtagagagttacagagtttagggatgcagtagcgtgaacacttctgagtttacaagatttaacctcatggccccatcttaaatcttgcgggctgcaaacctggagtaaaatctgttcagggaagctcatatgctttcttacaagttcattgggtgatatgtctggagttttccctttttgcaactgacttggatttgtcggaatttc

SEQ ID NO: 242 - DNA, 522 bp, Homo Sapiens
  misc_feature (411)..(411): n is a, c, g, or t
  misc_feature (444)..(444): n is a, c, g, or t
  misc_feature (493)..(493): n is a, c, g, or t
tctttgtttctattacttgtaatctaagataagttgtcatctctttaaaataacctgttatatctataaaatgtattttgtaagctttatggtaaacacaatacaaaaacctataatagattccactaaaagtaaaaagcaacaaattaaaacatactgttaaccacaaaggaagacagaaaaatgaagactcttaaatatttaagcaaaaaaacgaagacagtaagaaaggaagaaagaaagggaggagttacaaaacaaccagaaaacaagcaacaaatggcagtagtaagtccttactaatcaataataacactgaatgtaaattggactcatcctctggattaaaagacataaagtgggctggaatggatagagaaacaagacccaactatatggctggcctggcangaaacccactttcacctggtaaggacacacatngtctaaaagtgaagggggtgggaaaagacatggcttgccacagggcacngaaaaaggagccggggtggctatacttgg

SEQ ID NO: 243 - DNA, 153170 bp, Homo Sapiens
gatccacctgcctcggcctcccaaagtgctaggattataggcatgagccaccacgcccagcctaagaatgtgttttttaactgtatatatttaaggtgtgcaacatgatgtgtgtatgtatatatatatatatatatatatatatatagagagagagagagagagagagagagagaaataatttctgtggtcatgcaaattaacatatccatcatctcacagctacaatttttgtgtatgtgtggcaagagcacctaaaatctactcttagcaaaaatcctgaatacaatacgatattattaactattgtacattagacctctagacttgtttctcttacatatctgcaactttgtgtcctttgacctacatttccccatttcctacccctccaccacaccccagtaataaccactttattctctatctctgcattcaactttgttttttctagtttttaaactctgcatataagtgagatcatgcagaatttctctttctgtgtctggtttatttcacttagtacaatgtcctccagattcactcacgttgccccatatggcagaatctccttcttttttaaggctgaaaaatattccattgtatatataccatagtttctttgcccatttatccttcaatgaatacttcagttgtttccacacctcggctattgtgaataatgctacaatgaacgtaggagtacagatattttatgaggtgatgatttcacttcctctaggtatatacccagaggaggaattgctgggtcctatggtagtgctatttttaatttatttaggaaccttcatactgttttccttaatggctccactaatctacattcccaccaaaagagtatacaggttccttaagggtgtatttttcaaaagggtcgccgagagatacctattaaaatatatacaagagaaatcttataatatcagggatttgcttcaaaggaggggaaatccaagaaggggaaagtaaattgggttatataagaaacaagattggccatgagttaatgttgaatttggatgatgaatacatgggggctcattatattattgcttgacttttacacacatttaaattgttcaatagtatgtattagtccattctcacactatataaagacatacctgaaattgggtactttataaaggaaagaggtttaattgtctcacagttctgcagggctgtagaggcctcaggaaacttacaatcatggtggaaggggaagcaaacacatccttcttcacatggtggcagcaagaaaaaatgcagcacaaaagggggaaaagccccttataaaaccatcagatcttgtgagaactcacacactatcacgagaacaggatggggaaaccactccgtgattcaattatctccacctggtccctcccacaaaacgtggggattatgggaactacaattcaagatgagatttcggtggtgacgcagcaaaatcatatcaagtaataagctgaaaataccctttatataaataatgataacactgcatggaaataaagaaaaatctttaggatgcagcctaactggtatttacgattttttaaaccctggattaaacgcatctttttataaatggaaataattaatgaagaactgagatggaatcaaaatagcaaatcatgcacacacacacacacacacaaattctgtttagagaactaaaacaatatgtcagaaacgttgaagagttcatgtgcatcagttagttcctgccatgtaacaaaccacaccaaaatttagtagcttaaagcaaaatcatttatgtatgtcataattctatgagttacaaattgaggctgggctcagctgagaggttcttctcttcacttttgggctcatgcatgtgaggattaatgggagctggcaggtctagggtggactccactggaatagtctgtctctgttccaaaaggttagctgaagcttgttttcctggcaacagagcagagttctgagagagcgtgagtatgcaaggcctcttgaggcccaagcctaggttcagaacaggaatcacttctgatatactctattggccaaagttagtcccaagtccagatccaggcttgctcaaaacagtggcccatctctctggccccaatctccatagttctggtaaacaaaaaaaaaagaaaaagaaaaagaaaaagaaagaaaggaaggaaggaaggaaggaaggaaggaaggaaggaaggaaggaaggaaggctgagataacattgggtttttccaatgataaaacctagaattaatgaagagctaaaattagtaaattttcaaaaatacaaaacacataaaatgtaaaactgctgaaaagataagaagaaatgaataaatctataattaagacggaaatctttaataggccataggcctcaggagtcctcaaagtaaacaaaaaatgcacaagcatgcttatcttaaaggattaaataggtatttttaaaatattgatttaatacacatgtagaactattaagtaacaaaatagatacatacaattttaaagcatagctaaaaaatggctaaaaattgattattataatacatgtgtatttcaaatattccaaaagaagtcagtccactcatataaactaaccacaatataacaacattagaacttccaaaaaaggtatgtgtatatgaggtggggttttttcaaccttctaaataattgtgggttaaaaaaacataaaaactacaagattttggaaatgaatcaaaatgagagttctacatataaaatcttcatgaaaatggttaaagtggaaattagatgaaagatttaaaggcatttactagaaaacaagaaattttacatttttaaattaaaagctaattaaactcaaagttaaatttagttaattaaactcaaaaagctaacagacctgaacttgctcagcagccttacctaagaatcatctattttaccgatcttttcaaagaaatgttttgtttttattgatcaatgcctccatatttttgaaatttttatagttttcatttattatattgacaaatttttttaaattattaatgtggcgctggcaatacacttgtgaagcatttagttatttatccttaaaatatattagtacttggcggagtgcagtggctcacgcctgtaatcccagcactttgggaggctgaggtgggcaggtcacaaggtcaagagatggagaccatcctggccaacatggcgaaaccccgcctctactaaaaatacaaaaaatagctgggcgtggtagtacacacctataatcccagctactcaggaggctgaagcaggagaatcacttgaacctgggaggcggaggttgtagtgagccaagattgggccactgcactccagcctggatgacagagcaagaccctgtctcaaaaaaaaaaaaaaattaatccatgtgcacaaagaggcataatcagaaataatcatttccaattttggctgggcgcagtggctcatgcctgtaatcccagcaatttgggaggctgaggcgggtgaatcacctgaggtcaggagttcgagaccagcctggccaacatggtgaaaccccgtctctacttaaaataccaaaactagcctggagtggtggtaggcacctgtaatcccagctactcggggggctaaggcaggagaattgcttgaacctgggaggtggaggttgcagtgagccgagatggtgctatcacactccagcctggggaacaagagtgagatgtcatctcaaaaaaaaaaaaatcatttttattttgtttttaaaaagaaaaaatgggccgggcgcggtggctcatgcctgtaatcccagcactttgggaggccaaggcgggtggattacctgaggtcaggagttcaagaccagcctggccaacatggtgaaaccacgcctctactaaaaatacaaaaattagccagaagtagtggcacgtgtctgtaatcccagctactcaggaggctgaagcaggagaatcgcttgaacctgggaagcagagtttccagtgagccgagattatgccattgcactccagcctgggtgacagagcaagactccatctcataaaaaaaaaaaaaggaaaaattggaaaaataaagtacatgcagtttatttgacagagggatgtttaactgaaccacactacatccatatatatgaagttatgcagcaatagaaaagaataatggacatttatatttttagatataaaaagagctgttgaacctatcattgaaattttaaaaggaagctgaagaacaagtacagtgtaataaattatttgttttttacaatttaattatagagtaaatgtgatctttcttggtatatagttctatagattttaataaatatttggattcatgtaaccaccaccacaaataggacacacaacagtttcatcaccctaagaaaagttcccggatgctcacccctctgtagccaaaccgtcaccccacccataatccctggcaaccactgatctattttccatcactataattttgccttttccaagaatgtgacataaatggaatcatgtagtatttaacgttttgagaccagcttctctcagcatgtgatatggtatgtacctgtgtctccacctaaatctcacgttgaattgtaatccccgatgttggaggtagagcctagtgagaggcgattggatcatggggacagatttctcatgaatggttcggtatcatccccttggtactgtcctaaggatagtgagtgagttctgcagagacctggtttaagcgtggagcacctccccactctcttgctcctgctctggctatgccatgtgcctgctcacccttaaccttccaccatgattgtaagtttcccgaagcctccccggaagccaagcagatgccagcatcatgcttcctatatagcctgctgaacagtgagacaactaaacctcttttttttttagcaaatgacccagtcccaggtatatctctataacaatgtgagaacgacctagtaacagcatgtctttgagattcatccaagtttctaccagtatcaataactcattcctttttactgctgagtatgattgtattctatggatgtggtacatctgtttatccattcattcattgaagggcatttgggttgttttcagcttttggctatcacaaataaagtttctaagatggccaggcatgatggctcacgtctctaaccccaacactttgggaggctgagatgggcgttgaggtcaagagtttgggaccagcctggccaacatggtgaaaccctgtctctactaaaaatacaaaaattagctaggtgtggtggcacacacctgtaatcccagctactcaggaggctgaggcaggagaatcacttgaacctgggaggtggaggttgcagtgagccaagattacaccactgcactccagcctaggcaatagagagagactctgtctcaaaaacaaataaataaataaataaagttgatatgagcagtttttacagatgtttgtgtgaccgtaagttttcgtttcactagggtaaataccaggttcaggattgctaggtcctgaggtacgtgtatgtttacctttcaaataaactgacaaaccattttctagagtgactgcaatttccagttgttctgcaacctcaccagcaattggtgttgtcagaaactttttattttcataattcttatcaatgtgcacaattgtttttaaaattcacagaattaaaggaaaatatattgtgcactatttgtgtaattaaagcaaaacacaaacacataaacggaagacaaaaataagaaactaattcaagaaactaaagaaagaaaaacaaaattaactttttaaaattagaataaaggcatatatatgtaatagggatagtttgaaacactcccaaacatctgctctgagccaacaacaatcggatagcgtgagggcagatacaaattaaatatgagacttaactctccccgttaaaaataaggaaagagacttacccaacacccctcccccccgcccttctctttctctgtctctttgaaatgtatgtaaatctttttaaaatgtaaataggcctctagccagttttacaacccaggaatatctttgtcaaatacctaggagccatctctttgaaatgtaagcatccagaaaggtagtgctcctatctctgaatttatatgagtgggtaggtctctaactttggcaagttccttgcttcaagttgcaaagccacttcctgtcacaaggatgtgagaattttgtttttcctttggttaaagccaaccagcgaacacagatggccactccaattatcaggtgaatctaggatgaactatgtgtatgtcaaatggtacttctaagttctcctatttgagaaccagttattgtttgtcttgagagcatatctgtaatgggttttatcttcttcaggatataaacaagtaggatttctttctgtctttgcaaactctttgtgaattgcctgtgatgtgtctcacattctggttcaatgcttattcaatggcaattgttttctttctcttctacctttgtggagaggttttctaggttgagagaagattttgtttttaattatatttcccccacaatagcaaacacatccccaaccacatacacacacacacacacacacacacacacacacacacacaacaggtaattagacaggcctgagcagggcaggagagggctcttcccccacccactacgaatgtcagtgatggttccaaaattatcacattgcctctctaaaagtgataaattgggcagcgcagtggctcatgcctgtaatcccagcactttgggaggctgaggtggacagatcacttgaggtctggagttcaaaaccagcctggccaacatggtgaaaccccatctctactaaaaatacaaaaaatagctgagcatggtagtggacacctgtaatcccagctactcaggaggctgaggcaggagaatcgcttgaacccagaaggttcaggtttcagcgagccaacattgccccactgcactccagcctgggcaacagagtgagactccatctcaaaataaataaataaataaaataagtgagaacatatggtacttatctttctgtgtctgacttgcttcacttaagataatggcctccagttatatccatgttgctgcaaaagacatgatttttgtggagggattgtattccattgtatatatagaccataatttctttatccaatcatctgttgatggacactcagttgattccatacctttgccatcatgaatcatgttgtaataaacatacaagtgcaggtatcttttgatgtgattatttcttttcctttgggtagatacctagtagtgggattgctggatcaaaatggcaggtgcctgtaatcccagctactccagagactgaggcaggggaatcgcttgaaactgggaggtggaggtttcagtgagccaagatcatcccactgcactccagcctgggtgacagagcaagactctgtctcaagaaaaaaaaaaaaatgctgtgtgattacccttatatgggtttcctggatgagccatttgttaaattaatttttgttggaaatttccccgcagagctgttgcacattgtggggggttaatccccagacactcccatgaggccccagtcacccaggggtgcctttggctgggaggagcaagtgccctttctcctaggagctgaaaaactcagtctcttatttatctatgaaaacaacagttcagtttctcacataaatgtgtacagataaaccgaatttagacagattttaggagaaaaagcaattgagaattccttttagaatgcatctcccaactagaattaggatccttaaacaaccacttcttaggagaaaaccagctcagaataaatcaaggaccatcaaccaaagggaggtctggggctcaggaggacttaccagttccaccagaggagaagctcgaagcttcaatgggcccctgctggcaccttagctctggttttgggcaactcctttagggtcctgagtcttccctgaggcctcacgtgtttgggcaccaaattattgttgacgaaaagagccaaactctgtaaaatattttaagagatttattctgagccaaatatgagtgaccatggcccgtgacacagccctcaggaagtcctgagaacatgtgcccaaggtggtcggggtgcagcttggttttgtgtattttaggaaggcatgaaacatcaatcaaatacatttaagaaacacactggttacttggaagtccccgcggggctgggggcgggtatcaatggaaaggaatgttcaggttaacataaaggattgtggagaccaagttttattgtgaaaagaaatctctcagatagcagacttcagagagagagcagattgtaaaatgtttcttatcagacctaaaagggtgcctggctcttagttgattatctcctggatctggaaaggaaggggaaaaagggggtgggtgggtgtgggggtatagaatgtggatctttttccaccaaagattttgtaaggcaatttcaaagtatggcaaggcaatatattttgtgataaaacattgtgattttttttttttttttgtgagacagagtctcactaggtcccccaggctggagtgcagtggcgccatctcagctcactgcaaccttcgcctcccgggttcacgccattcttctgcctcagcctcccgagtagctgggactacaggcgcccgccaccacgcccggctaactttttgtatttttactagagacagggttttactgtgttagccaggatggtctcgatctcctgacctcatggtccgcccgcctcagcctcccaaagtgctgggattacaggcgtgagccactgcacctggccaaaacattgtgattttcttccttgttatgccagagtcagattgaaaagtaagtcacaatatacagggtcaaataaaacccatcttgtaagaatttatggtttgtagggcataactccctagaccccttaggtaggaatttgggcaagataaaaaatcagagtttagtcctcaattccttaagataaatctctttctctatatatatctctctctatctcatatctccatcctattctctggaaaactctgactaatgcaagaaattaaagagacaaaacacataatacaatatcttaaacaacaaaatactattcagccataaaaaagaatgaaatcctgtcattcatggcaacatggatgagctagagcagtggtccccaacctttttggcaccaggcactggtatagtggaagacaatttttccatggtcggaagggggtgggaggatggttttgggaagaaactgttccatctcagaccatcaggcagtagttagattctcataaggagtgtgcaacctggatcccttgcatgcgcagttcataatagggtttgtgcttccatgagaatctaatgcttctgcacatctgacaggagatggagctccggggtaatgctcacctgccactcacctcttgctgtgctcccagttcctaacaggccatggtccccataccaatctatagcccaggggttggggacccctggcctagaggacattatgttaagtgaaataagtcaggcacagaaacataaatgctgcacattctcacttatatgtgggaactaaaaaagttgagcttacaggcccggctcggtggctcacacctgtaatcccaacattttgagaggccaaggcgggtggatcacctgaggccaggagtttgagaccagcctggccaacatggtgaaatcccatctctactaaaaatacaaaaattagccgggtgtggtggcgggtgcctgtaatcccagctgctcaggaggctgaggcaggagaatcgcttgaacctgggagacagagttgcagtgcaccaagattgcaccactgcactccagcctgggagacagggtgagactccatctcaaaaaaaaaaaaaaaagttgagctttcagaagtagagagtaaaataatgtagcaggtagaagaggatacggagaggttggttttaacaaatacaaaatcacagctagataggaggaataagttctagggttccatagctctgtagggtgactgtagccaacaatcacttattgcatattttcaaatagctagaagagaggattttgaatgttctcgcacaaagaaatgagaaatgtttgaggtaccctgatttgatcattacacattgtgtacacgtattgaaatatcactctgtatcccataaatatgtataattattatgtcaattaaaaataaaattttaatttaaaaatacattttaaaaatcaatacaatatctgacctgacactgcaatctcaactcaaggaggaaatgaatgctgtaaaaggcattattaggtcaattggcaaattggaatacagatatatatatatatatatatatatatatggatagatgatagactagataaaagtggtgtccatttaaatttatggagttagtaactatactgtcatacaggagaatatccctattcttaggaaatacacactgaattatttgggagtaaaaggccacgataatataaggccatgaacatataacttatgctcaatagattcaaagaagaaaatatacaaatatagagagactaatatagatatatatatatccatagatagagagaggtggggcaaatgctaaagcaagaaagataaaatgtcaacaataggcaaatctcaggggagctggggaaaaggtatcgtacaatttgtattttgcagccggtatgttttaaattatttttaaatgaaaagattttttaatgggttgaggaaattggagtgacttatatttatgacatccaatggactgtgcatgctgtatggaaacaaggagaaaataaatgtcatcattgcttaacaagtgaagggtaaaaagacaattaactcactgaagactacgcacagaaacacaaaagcctttgcttctgtggttataggtttaccaaaggcacaaagggatttgtatttattttaggattataatttacatcacttagttggaaaaattacagattttaagatatttttacaaatctgagtgactgtaaagactgctaaagtcttgggacatattcttaccaagtcccagatcttttgttttgttttgttttgtgcctgaaatcaaaccaggttttttagaccaggaaaacgtgagaagctagagctgctctactcagttggcccaaaccaggactccggagattattcccttatacagcaggcaccacattagagaaaggattctggaaaagtgagctggaacagaaaagaactgtctcaatgggaaacagactccaaaggacgctattggggggaggaaaacacaaaatatttcttgagaagaatgtggaaatggcaaagtctctagcctccagaaaccttaaactctagggaaagaaagcaaaaatttagaggtaagagtgttcatattaaaattcaaacaataagtagtttttctataaactctctttttttctaatcatgaaagtacacataatcattctctccaaactcagacattttagacagatagatagatagatgacagatagatagatagatagatagatagatagatagatagatagatacacatgcatacatactacatacatatatacctacatatgttggcacatagatgttcctttaccacagattaagttattctagatgcatatcttgtagcctacatttttatacattttcatcattttaataactgcatactgctctattatattctgtattttctatattagattagatccatgttttatcaccatttaggtagcttttggttttctgttactgtaatgttgagataaacgtctttatgtacttgttcaattattcccattaaacaaaagcccaaggtacaaagtttctgagtaaaaaaataggcacattttaaggcttctgatatatattgccaaattgtgctacaaaagaaaaactgtaccaattaacactcccagcaacaacgccaagagaatgctagtttccccacatctcaccaacactgtctagaacgcatagttttagagatgaacgctgggaaccgacgcactgtttgctctacctctccccctcctaacagtctagaacacaggcgctcaataaatcaatccaggctccagtccagtagacattctgatctaatctgactgctctgggtaacagaaaagtctcccttggttcactgcccagtatcctggcatcatgtggatcctataaaggcagtagctccaagcacattacagagggacccaactccattaaaccaccaccagctccccaagccaccccttcagccatgaagttcctgctcctggtcttggcagccctcggattcctgacccaggtgatcccaggtaaactggataaataggaggaaaggaaaactgggaacgaggaacactagcatatctggttgctctggtgatagatgagccaggttgggtggaggcagggctcaccccactgagttccagtctaaggtagagatctcctaacaaccaccactagccttgatatcccacacccaaacaccaccctatataacctttacaaaaatttgttttctattctaaaatgatagtcaccctcaacctaaaccaaaatatcttctttcactttatgtgagctccttatatctaacctcctaagacacactgaaggcttctgtcatcaccatgtgcatccattgagatcagcccgggttggagctcaaaggagattttgagcctagaaggaagagattgaggttcccatccctatgctcaacagacagctggcaggtgggggatggaagcagacctcttagagggctagttcccacaggatggtaagcaatgggttcagctcaaaccctggggctaggagataatgcagggtcagaaagagagagagacagacacacagagagcagggagagagagagatcagaggagggccaggcaacggatgtgaagaaagccaaagaggcttgagggtgctccgaagaggcccctgctgtgagccaatggcagacacagagcactgaggcaaacagatttcagcagatggtgaaatggtgcacagcactgggtgaatgcaaaaatgccctgtcactggcaaccgttattttctttttaatgattttggagaaagatttgactcctcccactttgccccaggttgactcatatttacagttttagagtctatgaaaacaagtaaggtagaaacaccttaaaagggagcctgtggggtgagtgagactagccccatttctcccttttgagtatccaagctcctccctgaccgtgaagaccaggctccccacccctgtttttacccatacatcctattctgtagtatcaaatttagcaaaaagcttcaaagatgcagatactggcaaagaagaagagctcgtcagacagagttccccaaggccatcaatccaggaagatttttgtctcctcatcactggctttcccaagtctcatttgcacaacatcctaaggatacacctcagaacaaaaagccaaacactcccatctggcgctgacgctttagtagccctgtgctgcttctaaccatgacttctctgtcttgtcctctcccatacagccagtgcaggtgggtcaaaatgtgtgagtaacaccccaggatactgcaggacatgttgccactggggggagacagcattgttcatgtgcaacgcttccagaaaatgctgcatcagctactccttcctgccgaagcctgacctaccacagctcatcggtaaccactggcaatcaaggagaagaaacacacaaaggaaagacaagaagcaacaaacgaccgtaacatcataataaccactgctatcgcctccaccaactcagagaaatatcatttccacagttccaattcctcctacattgctgagtactagccaaggctcctctttatggggcagatatctatagccaaccccaaaacttctgtcttctatcattctgtcattcatctagtaactaatttggagtttgtatctatcttacgagaacaatcatcatgcagattcgtccacaggggatctgtcagtttgggtcctccaaatgaaaaatgtcaagacagaattggacatgcaaaagattgactgggagaacacacctctgatggacaaaggtgagacagagcagccacaggcagggagagccttcagactgcaacgctggcctgatacgtgtcaaaggagagagggatagaggaggattgaatagaaggagactaagactgcagctctaagaaagtctcagccaaacagatggggaggcccaaagcaaggcttgcccctcagaggagctcacgcagggcaggaatagccaggttctcatatcccaggggttcagactttggctgagaacagcccctggagaacatggggtgactgctaccataggtctggaagtatgaggctgtccaccaactatccccttgaagcaagttctcttgaaaggaaatctaaacagtgcacccccatggctgccacggagtataaggagggagagaaaggagctgaaagtctaggtttggccagctaggtagactgacttgtgaggtatttatttattcatttgagtaacaaagcagacagaatacatagccaccattggtagtacaccccaaaagcaaggatggcatgatgctggtgactcaaacgtgcctactcatggtgtcaaattggcataatcctcttgggaagctgtgtggaaataagcacagagaagcagaactctaattgcttaatccactaaacattacttctgggaattggctcatcataaattatccaagagaagcacaaagttatgggcacaaaggttttccatataatattatttaaaatgctgagaaaatgaaaaaatctaaatggtgaaatatatactaatgccatctataaatacaaacaaatagaatgtttatagaataatggaacataataacattattcaaaattgcatttatgctatagttgtcaaaattgtctccttatatgatacaaaactcatgaaaattatgacttttttgtttggttggaaagcagaattatgcataaatttcctcttacagttcgatgcccattagttttatataacatttatttgacacgtactgacttctatctgagaagaacaaaccaaaacactcaggcctaaataattaaaaacggtcctaaaaactagcaaaccagataagaaaagatgttaatgcccattccctaacttatgtcttagaccaaaattaattctagatggttttaaaatgacagtgtaaaagtaaagtattaaaagattgtgtggtcaaatattcaatttaagagcaaggaaattcttataaatataacaatagaggcagaactcatgtaagaataaattgattaggtggtattaaatattaagttcttatgtatgtcaaaagatatcattttgaaattcatccatcttattgggtattgcaggagttcattcctttttgtttataaatactcttccgtcatatgaatagtattcatttgtatactggtttgttgatggacatttgggttgttcccagtttatggctattacaaataaagcttctatgaacatttatgtacaaatctttgtatggatgtatgctttcatttccctaaggtaaatacctaggagtagaacgtctgaatcatatggtaggtgaatgtttagcttttttgtttgtttgtttgtttgtttgtttgtttgtttgttttttgagatagagtttcgctcttgttgcccgggctggagtgcaatggtgcgatctcagctcactgcaacctccgcctcctgggttcaagcaattgtccttcctcggcctcctgagtagctgggattacaggcacgcaccaccccccgaccccggctaatttttgtatttttagtagagacggggtttctccatgttggtcaggctggcctcgaactcctgacctcaggtgatccgcccgccttggcctcccaaaatgctgagattacaggcatgagaatgtttagcttttaaaggaaatacaaaattgttttccaaaatggttgtgccagtggatgtgcccatcagcaggatgtgaaagttccagccgttcctcatcctcaccagcatgtgatatggtcagtcttttgcattttcatcattctaatagatgtgtagtggtatttcattatgctttcaatttgcatttttttaataactagttatcaaaaaagtatattctgtatgattctatttacataaagttctttaaattcttttaaaattgcatacaattatttaaaatagaaagtaagaatctaacgacagaaagcagatcactggttgtcaggggatgtgaaaggtgcatggagagggctgaaagaatgtaaagggacctgaggacactttgaggggtgatcagtcaagacacattcataggccgggcgcggtggctcatgcctgtaatcccagcactttgggaggccgaggcaggtggatcacgaggtcaggagatcaagaccatcctggctaacacggtgaaaccccgtctctactaaatatgcaaaaaattagccgggtgtggtggtgggcgcctgtattcctagctactcgggaggctgaggcaggagaatggcgtgaacccaggaggtggagcttgcagtgagccaagatcgcgccactgcactccagcctgggcgacagggcgagactgtctcaaaaaaaaaaaaaaaaaaagatacattcataatcttgattgaggtaatggcttaatgggggtgtacataagtcaaaaaattacaaaatggtaaactttaaatgtgttcagtttattgtatgtcaatttaaacttccaaaaaagctattattttaataaaataaataaatctcacagtgaaacagaaatattaaagtatcataaatagtttaaagacgtatgacaaactgagacatgtgatgaagtatcgataccaataaaatataacaagttaacatgaagcaacagggaaaacatgaaacccctagcagaaaatgaaaaagtaacatgaactagctttttaactctataaacggcctgaaaaatgggaaaaaatctgtgtgactgtgatcaaataaatgcagattaaaactacaatgagatcttgttttttacctatcggattgtcagagaattaacaaacccaagtctgacaaggcataaatagaaataagtctcatcatcagatgctccggtttataactaaatatgtccattctggaagacatttatctatacagctttcaaaacccttaaaaatgttcatgttctgtggctcagagactctacttttagggatatattctggggaaataattagagttcatatcaaaaagattaatgtatatacagcacaatcatagcagcatagtttaaagtagtgaagaggcagtggggtaagatggctgaacagaagcctccactgatcatcctccccactagaacaccaaatttgacaactatctacacaaaaaagcaccttcataagaataaaaaatgaggtgagtgatcacagtacctagctttaacttcatatcacctaaagaggcactgagaaggtaggaaagacagtcctgaattgctgacaccgcctctccccagtcctcaggcagcagctgtgtggtgtgcagagacaatatgtgtacttgcaggagggagagcacagtgattgtgggatttcacattggaactcagtgctgctagcaccaggcagaacccagcaggtgcctaaaagggatcatttagaccatccctagccagggggacatcacccatcccagaggtcggaactccagtttccgcaagcctcaccaccgtgggctaaagagctctggggtcctaaataaacttgaaaggccgtataggccacaagaactgcaattcctaggcaactgctagtgctgtgctgggctcagaggcagtagatttagggaccactcaacctagtgagacaccagctggggtgtgtgtgtgtgtgtgtgtgtgtgcgtgtgtgtgtgtgtgtgtgattctcgtgcctcagcctcccaagtagctggtgatggcagtggcagcccatctggagtggacgctgccatcaagccagctgcagcagggagggacagctggggctgcacattccacagagctgcagagctggggacaatgagagccccacaccttccaagctggtgcagcaggagctccccaggtgcaactgcagccactcaagtcacggctgtgaaccccggcctccctgtgttcttgtgggtgctgggagcaggcaggggtcctgcacttttgggtgcagctgcaggcgcccaaaccatggctgcggaaccagacatctctacactcttgagggtcagggaagtccccactgccctcacaagcttagaagtgcctgctcccacagcctggcgcctccctgctgtcggtgcccgctctaatcttggagcaaagttgaggccaagcccaggtgctgtcatagcctgttgggtgtgcacacgcttggggcagtgctgacataccagccccctgccgcctcggacccctacagacctcgggtgctgacgagcataggaggaaagccgaggtggggctgagggcagctcggcacctacagcctgggtgccatgaatggcagtaggagtcttctcagttctgtctccctcccttcagtgtggatgaaggggtagaaatgaggtacagcatcctgtctttcccaggggtcgtgttgcatcctttaatagtttaccactgacagcactaccaacgatttggggattgtgtctcgaggaagcaattgacctaaatttcatgtatcaatgaaactgtttttccttatggttttaattatttatttattttataaaataaaataaataggcttttaatatataatgaaagccttttaatgttaacatgcaaggactgaaagaatacctgttggactgcaagatggctgctccctctaccctcagcttcaactggcctgtcagccaagctttgatttcctaggcagaatataaaagaattcctctctgtggtggtccaggagaccaagggaatttggggaggtgatagaactgcaccctgatcatgctggtggtgaaaactcgtgcaaccgtacacccaaatgtcatcttttttactgtatgttaattttagaaatcagaaagtaaaagatgcaatcacaaaaatatcatttggtaggacaaacttattcagtatatgaagataatagagaacttttatacaaaagtggctcttacaaaatattaatataaaatattaaaatataaattctcaagagctataacttaaacttctatgttaatttaggtaagcaattctcctatgaaaagacttaacgaattctttccttttcttttcctcttgtcttttcattttgctgcaaggagcagccttaaagctgactgaaacagttattgtgaccagcatgtaatgcttgaaaagatgaaaatccagctttaaatatgctcaatctcaataacttttttggtttttttttttttttttttttttgagacggagtcttgccttgtcacccaggctggagtgcaatggcacgatctcggttcactgcaactttcgactcccagattcaaatgattctcctgcctcagcctcttgagtagctgggattacaggcaccggccaccatgcccagctattgtttgtatttttagtagagatggggtttcaccatgttggcaaggctggtctcgaactcctgacctcattatctgccgccttggcctcccaaagtactgggattacaggtgtgagccaccgcgcctggcctcaataactttttaataggtatatgcttagtttattcatgtttctttgctagttttttttccctgcaaagaagaagaagaaaaataattttaaatcttatttgaaggatgattgtacactgtgttattggccttggaaaggagagaaggaggaaaaggagtaggaaaagggaaaatatcttaagaggttgtactgttaatctacttccaggcagattttaaccactaaagctaaaatgctattatgaaattgaatatttcaattgaatattgaaaatggtataatgatgccgggtacggtggctcatgcctgtaatggtagcactttgggaggccaaggtgggtgcatcacttgaggtcaggagttcgagactagcctggccaacatggtgaaactctacctctactaaaaataccaaaaaaatagccggaaattgcttgaacctgagaggcagaggttgcaatgagctgagatcatgccactgcacttcagcctgggcaagagagcaagactccatcttaaataaataaataaataaatgaaaatggtatagtggcttgaagatgcaggggcccatgaggaagaacatggatggcccctagaagctgaaagcagcccccaggtggcagccagcaaggaagtggggtcttcaattctacacgtgcaaggaactgaattctatcaacaacctgaatgagcttggaagctgattcttccccagaagccgcagataagagctcagcctgctaggggcttgagaaaggggaaagtgactttaaaaatgtaactcgagggagttccaaaaggctaagcgattcggtgaatctaataaacatgttaaaatgcataaagttcgggtgtgggggaaagggaagggagagcattaggacaaataggttcttttctgagttctggccaggaggcttcttgatcagttcaaattgttacaaagttcagctggaggtttccttctccctgtggccgctctgggcctctggcagccctcctcaaggagcaatccgtttccttcagagggtctgtgggttctcctggcttccctaatgcgttcctgcagtccttctgaagcaaaacttaatgatgcgagcctccacacgctgctctgaccgtccgagtgggagctgcaatctagtcctgcctcccgtctgtcatgatccctggtggtttttgactacagctcaattgttttagattccatgtgtaagtgagaacatgaagtatttgtctttctgtgtttgactcatttcacctagcagaatgtgtaataaacattaacaaaatgaatgtgtaaaatcaggtagtgatcacagctacaaagaaaataaaacagagtgatagatggaaagtgatggggaggaagaacctggttagaaatggtggtcaggcaggacctctctaagaagggaaaagagctgtgactgcacgataagccggccacgtgaagaccttgaggacaacatgcaaagctgatgacccaccggccctgcaaagaccgggcgggagataagcttggctggcgcgaagaaagaaggctggagggagtagaaatggggacaggagctgaacgctgggagagggggctcaaagccagctcgcgtaggcagggactgggcactcgcaatgcgcgcagaacaaaggcctctctctctctttcgccacactaagggccaacatggtcatctccaggtgcggattctgccgtaaaatgcgcccctggcgactcacgaccaggacgcattccgcaccgctcccccacgccccgcagcccgccctcgaggctgattgatttgtgccagtctctaccgccatctgccggcagcactcggtacacccgcgccctggaggtcgcacgcgctggccaaacgggcgcaccagacacttttcagggccctgccaaagacctcccaatgtctactggcgtcccagacacaagagatccaggccaagactcacacttcacaagatacacagacacgggccttagggaacaggaaattccatgaaacttccatttacccaattagccggactcactgagccccagaatagggttttcaaccaactcctactaaaattaaaaagtaatgtgtggtatagattggaataatagacattggaggctacaaacgatgggaggcggagaggggtgagggttgaaaaattacctattgggtgcaacattcactatccgggtaatggggcactagaagcccactccaccactatgcaatatatgtatttgtaccccgtaaatctataaaaataaaaactacattaaaaataataataatgtctggtcatctaaatagtacctctacagcttattaagtgctctggagacgtcccagttgcctgtccttcccattaaaggtgatatccagtgctgatttccccttcaacctcgggttcccataaacctcttctttctcactcctgctgccctccggtactccaataaagaatgatagatgggccgggagcagtggctcacgcctgtaatcccagcactttgggaggccaaggcggatggatcacctgaggtcaggagttggagaccagcctggtcaacatggtgaaaccccgtttctactaaaatacaaaaattagctgggcatggtggcgggcctcagtaatcccagctactcaggaggctgaggcaggagaatcgcttgaacccgggggcagaagttgcagtgagcagagattgtgccactgcactccaacctgggcgacagagcaagactccgtctcaaaaaagaaaaaaagaaaagaaacagtcccagtatgcatccatgtgcatgtgcatgcaggtgtatctgcctgtgagagctgcgcacgcggctctgagtacctgggaagacacccatgtacagatgctgtacatgtgcggggtcactctctggcgcattcggaggcatgagggctacgtgcaatgcgagggaacctatgtccaggcttcctttcttggttttcctcctctgaactcatgcatcccttcacaaacagtccagctcctggctaaaaacctatgtgtgatttttcagcccaaacacaggcaatgacaggttttacctggcaggcctcacagctgagtcgtgcacagctgatgcgttgcagtctttaaagacagttgcagacacagactcaggcctcctggacagtcgacctctcacacacatctccgctcccaacccaagtcttcattcagacacgtcttcattgcagtggggtaggccttcggccaggacctccttatcttggggagtggagaatccttgaagacactttcctccatgctgactcagaagttttcccactctcccttccccaccccatccctggcccccaggtccgtacaacttcaggagcctttttgttggaagcttttctgcagtgagaccaaccccacacctgtgctcatccacccgaccccagttggcatcattctatgaggaaattagaacaggtggatctgtgttctacaaaataaaacaaaccaggttctctggtttagcctctttcttgtactgtaataataagagatttggggcttggctattacttgctttgactttttttgttttgagacagggtttcgctctgtcacccaggctggagtgcagtggtgcgatctcggctcactgcaacctccgcctcctgggctcaagcaatcctcccacctcagtctccctagtagctaggactacaggtgcacaccatcatgcccagctaatttttatattttttatagagatggggtttcaccatgttgtccagtctggtctcaaattcctgagatcaagcaacccactggcctcagcctcccaaagtgtgaggattacaggcctgagccaccatgccgggccatcattaatcagctactccagcacttagcagttcagctctctcctgctcagctgagctcctgattgtacagtggttaagagcaaactgcctctgccacttagtaacctggtgacttgaaaaatcactttgccttttcatcctttggtttcttcatctgtaaaatgaaaataacaataaacaatacctacttcacagggtggttgttgtgagggtgtagtgagttgatgtatgtaaagcataacgtaggttccattgaagtgtttgctattgtgttcaacagggtccatttctgcttggagatccacatggctctggggagtacctgttggctcagcctaggtcacgtgttccaccttaaccatcccttccctgctccaaggtagagcccgtgacctgaactaaaccagcaggcacgctccacctccaacaccggctcaaggtgggcgtgtaatataagctggttcaattagaatgaatcttttttttttttttttaaagacggagtctcatcccccatcacccagactggagagcagtggcacaatctcagctcactgcaacctctgcctcccaggttcaagcaattatcctgcttcagcctcctgagtagctgggattacaggtgcctgctgccacgcccagctcatttttgtatttttagtagacacagggtgttgccatgttggccaggatggtctcgaactcctgacctcaagtgatccacccacctcggcctcccaaagtgctaggattacaggcgtgaaccactgtgcccagcccaattacagtgaatcttaatacactggctgaaaattctgggacacagccagtctctctctttccaacaggacatgtacaaggacctgtacaaccctgggagatgctggcatattggggccacaagcagtgctgacctgaagaaaagggcaacacctcagaaaacaaagtagataaatagaaaccaagtccttggtgccatcacttgatttctggacaaagcctcacctaagctatttattgacctgagcccttcatagtttaggccaatgtgatttggttgttttgttacctgtaaccaagtatcttaacacaaagtggatctgtgagtgaccagagcctcttgggggttgtagcaatctagtagttggcccagaaaggccaactctgagatggagtgtagggtgcagaatgttgagtaatgagtgctcttggaatcaacaactgaggaagacagaaatatgcaggattgggcacagggagaagttcagctgcagtgcaggcccaagggtagttgcagctgagccttcaggaagttctggagccagagtagcccttctgagttgttccaagcactgaaggcctagcaagttccaggggtattaaaatcaataagcctgtcagccccgacaatgccctcaataggtctgggcacagattggagagaagctgggctcccactgcaccaggagggagtggcccagagccactgagccatggagactcaggcagggggttgctccagcacttcttctggagaagttttgagccccagatgcagttagcacagttgcccgccccttatcataagacgaagtccgttcccaccacatcttctgcaagacctagctggggaccccgagacactggcaaaaaagcaaatgtaaatccagctttattggtaaaaaaggaatagcagatttaatcagaaattcccacctggcccagcagcaccaaccagaaagaagggaagaagagaggaaaaaaccacaggaagaaagaaaggagggagggagggagaggaggaaggaaggaggagggaagggaaggggggaagaagggagggagggagggagggaaagaaagagggaggaagggcagagggagcagggagactgtagatcagggtctgaatggagatccggtcctggaagtaaatgatccaaggctccaggtgctgggaagagagcaggaggggagggcggcccatggcactgccatctagaagggtagtggctcttccacaggaatgttgaggatgacatccatgtctggggtgcacctggtgggaggcagcacagaaggccatgagagaccagaggtggcggtgtgggagcacccactcagaggagccctgctctttagaactctggtacgtacttgggttggggggcaatcccaaaatacaatctgtgatctatctgtgacctcaaagcccaactgtgcatacacaagcatacacacacacacacacacacacacacacacacacacatacacacacatcaaaaatggaaaagaaatgagtttggcaggacaaatgttcccctgacaagtctgaggtcaagagggagcaggaactcagctctgaaatgctgagggccctcaagatgatcactggctttggagtgaggatgacaggtttgataactttgacctgtgtcaccttgagcaagctatttctactctcccagcctcactccttcagttggcacttaagtgaaaagcactcattaagtcccagaccccaagtgagcctcagtttcctcatctgtcaaatgggtttaatattctaacctcagtcattggtggaaagattaaatgagaccatgccagcaggtaataagtgctcagtaaatgacaggcattattatttccatgaaagtagcaagagagatggattcccatcagcaatatattccccattgcagggaccagcacaaatatttaagaggctgaaggattacattctgtttcactctcttttctctcttccaaggagaccatcctctctcatggtttcaataatctgctgatacacatgaagtatttaggcaggaaatgtcaggatacttgcaatttacaaatactattaaaaaaatgaacatgaaaccaacatagaaaaaaaaaaaatttctaaatctagatgggcaaaactggctattcattatatcattctctcttctttatatttgaaatttttcataataatagtaaaaaaaaaaagttcatctctatgctggcaacacctaaatttctacttccagccaatatctgtcctctgaggtctacactcatcttgtcaattgcccacccaatgactccaccttggcacctcatataaatcaaacttactgtccaagtcaactgtatggtttttgttttgttttgttttgtttgagacatggtctcactcggtcacccaggctggaatgcagtggtgcaatcacagctcactgcagcctggaactcctcaatcgatcctcctgcctcccaaatagctgggaccacaggcacgtgccaccacatctggctaattttttaattttttgtagagatggaggtctcactatgttgtccccctggtctcgaactcccagcctcaagcgatccttcttcctcatcctcctaaagcactgggattacaggtgtgagccaccatgcctgcctccaaataaactttttgactgtgcctacatacacatccctcaccccgccccagccttcccaatctctgcatttgacatcaccaccaccccattataaaagtcaggaacccaggggttattcttgatacctccctttcctgtacttcccaagtcatgcaagtccttcttactttcctaaatatttctccaatctatctatttctcccatttcttctgccacactcttggccaggccacttcccatgttcccctggacaactgccctcacacccactagaattccagctgccattctggctccttgccaatctcatccccatgctcttttcttttcttttaagaaagagtcttgctctattaagcaggctggaaggcagtagcaccatcttggctcactacaacctctgtctctagggctcaagcaatcctcctgccttagccttcactgcagctgggactacaggcgcacgccaccacgcctggctaacttttgtattttttgtagagatggggtttcaccatgttgcccaagctggtcttgaactcctgggctcaagcaatcctcccaccttggcctcccaaaacgctgagattacaggcatgagccaccacacccagcccaccatgctcttttcaaactgacttttttggaatacaaatctgatcatgtggcttaagatcctttgcttctgggatcaggcagaacatctgggcctacagggcactgcatggaggtccctaggggctgagttgccctgctcccttcccgccactctccctgtcactctgcattccaaccactctggcctcactcagctccgtgtcaatgccaagttccttccaaccatagctccttcacagctcaaggctcaacatgtggttggttcatagagcagtaacataagcatcaccgggtagcttcttagaaatgcagaatcaggctgggcatggtggttcacacctgtaatcccagcactttgggaggccaaggcaggcagatcacttgaggtcaggagtttgagaccagcctggccaacatggcaaaaccccgtttctactaaaaaacataaaaattagccaggcatggtggtgcacacctgtaatcccagctactcgggaggctgagacaagagaatcacttgaacccaggaggcggaggttgcagtgagctgagatggtgccagtgcactccagcctgggagacagagctagactctgtctcaagaagaaggaaggaagaaaggaaggaagggagggagggagggagggagggagggagggaggggaaagaaagaaagaaggaagaaagaaaaagaaagaaaagagaaagacagagagagaaagaaagaaagaaaaagaaaagagagaaaggaaggaatgaaggaaggaaagaaagaaaagaaaagaaaaaagaaatgtagattcatgagccccactgagacctactgacttggaatctgctttttaacgcgatctccaggtgtttcctgggcatgttccagttggagaggctctgcttaacagtgtgccatttctactttttaggagggaaaatgtgcttccttgctcctggtgttcccttccacgtggaagggcatccatgagtgtattgctcctggcctctctctgcccccttaaattctgcttttggaaagggggtatgaccaccagaatggtgagtgtgaggagaggaaggggacacagggagcccagtccctttctctctcagcagcaagaaacccgaaaggactccactcttctctgccccaaggcctggctccacgtgggtccagctccaccatgatcgggtggttcaatttgcctaattctgggttcactattcagaggccaacacagtctctaaaatcagctttaccagaataaaggtgataacctggcccacatgcaccttacccctttcagtctcattcactgtgttcagagttcaggtaaagacaagtgactatttattacgtcccccggagaccctggcaccaccgcctagaattgctcttccttcagctcccccatcagtctctttcacctagtgaatttctatgcatccttcaagcctcagttcaaatgtcacatcctcaggaaaaccttccttgactgcccagacttgctgtcctaacagttgctttcttttttcttttttttttaattaaaaaaaaatttttttttagatggagtctcgctctgtcacccagactggaatgcagtggcacaatctcggctgaccgcaacctccgccttccaggttcaagcaattctctgcctcagcctcccgagtagctgggattacaggcacccgccaccatgcccagctagtttttgtatttttagtagagacagggtttcatcatcttggccaggctggtcttgaactcctgacctcgtgatccaccggccttggcctcccaaattgctgggattacaggcgtgagccactgcacccagctcctaagagtcacttttgcagtggcatgtactctactcagcagctctgggctctgctgcaactccacatttatttgtggctcattatcgactcatgtccagttccctctttagttccatgagggcgggaccaaggactgttctcattcacatggtgcctggcattcagaggcacttcataaatccaatagtattttgttttgggggcggggggcggtttagaaatagaagaaaaggaagaaatggcgataggagaggagaaggaaggaaaacgacaggagggagagacagatgaagaagaaaaattaaagaatttgcaaatgctaggctctgccacacatggtcctgtggtgtcatcaaggagaggtaagcctgggggacccccaacccaaccgcagagggcttgccccaaggaagggcaggcaaagaattggtttctggggcccagaaacctgccaagtgaacaggacagacttctctccttgtagagtgtcttccaggctattcttccctgaagccaaccaccccactcaactctgccttcctcaaaaacccagaagtggaaggctgtacccacttggttgacacatgggatctgggaactagaagggcccttagagattacaccacccagcctgctgtgtacagatgggaattggaggcctttgcagagatgggaaaggtcacatctgcccctggtcagtggcagatccaaggtggaaacccaggaccgcccctccctccctgtacagggttctgccatccacaccaggctgccttccccaagaacagagagcctccgtgagctcagagtgtgactggtttaagaggcagtggcaaaaagatcacatacttgggtctccgaagcagaacatcctcaaatatgacctctcggggttcccgggtctgggcttggagctcttccacctcggcccttaatacaggcatgttctcctcaaactggtcaataatctgagaggaaaggcacagcaggggagaagggagaggcaaatggcccccaaccaaagggagaaaggccaaaatgaacgaggagcaaagctatctggggaaatggtatgggttctgtcactgggacttgctggactccagggaggggacttccccatgcaaggtgcggctggcttccaagttagtgacaatattcagtggtgctgaaacaggtgagggatcatggagaatggagacaggttacaaagtggcggggaatgctcaatcatgggaatgaatggaggctggcagagatagtgaagggcatacacattaaaaaccagtgaagaggcaagataatgaaaattaattcaagaaggcagtgatggtgaagttcattaacactgataatgggtggtgggcagtaacaagaatcaaggggtaaagatgcacggtggttaatggctgaataggtgatgtttggtgatggttgtaaatgggtcattagccagcattgctggctaatgaggcaaggcctaggtcagtgccaatcgccttcccagatgaaagacaagtgacagtaatggcaccggcaaggagggaggccaacaccagagtcagagacctcctgagcgccagatcaggagaagcctgactcattcccacaggccgtggggactgcccatccactgcttccctacagggaccaccaccttccttgcccacgcacttctctgaacctttgcatgcatttcaggaagtcctggctttcccacatcttctgtaggagagcctcttcatagggacgctgggtttcctgtggaggaagaagaggtctggcccccaggtgcctcttcctgggcagcagaacatggtagagaccgatggggctgcagtgggcctggaggcagaggatggggaagagggcggggtgggggtgagacctggatccccgctcccacacagcaactggctactcaccgccaccacagaactcagaatttttttcttcttcttctgaatcttgtcagacaaggattccaggacctttctgcgcatctcaccgaggtcatccagctcatcctgggagccagcagaagggtgttggtcaccagtcctgcctcccacacagtctggtgggagaggggcaggggctcccctacctgctggctgtccttaacctgctgcagctggcgcataagagtggagatctggacagacttgatggaatactcatggtccatgtaagtgctcaggaagttcacttcctcctgggtcttctcaatcttggcattcagctgctctgcctgctgctcaagatctggggaggggttagggaggtcagcagggacaggaggcaagaccttccctcaagcacctgggccccaggaggcccaggaggcaaggtctccttggccagtaactggggtctgggctgaggtgagctcacacagggctgggaggtggttaaaagttaaggctctagacggttttccacccctgcaggagaagaggcaatgctgggtaggaaaaaggaagggaattggtgcatgatccctagactagtccccactctgccactgacttgccgggtggctctcgccaagactgtccctctccagacttcagtctcctcagagacacactcaaggaagtgagaccaggcagatggggtgacagtggctcccaagacacaacccatggcaggattaagacaaagtctatcctgtcttcctccagagagacccccaatgtctggggttgactgatccaccacccctctgctcagcaggtgtgtagtctgctcagggaaaaggaaccacaggccaggcaggatggaagccaggagacccaggttctagcccagccactgactcccagaaggaccttggcaggaaacagagccaggctaggattggattctggctcctagctatataaccttccacaagctactgcacctctcttagcctcggtttcctcatctgtaaaatgggaggacagcttccctgcctccaagtagttgcaatgactgagtgtgtgcctgtaacaatgcagacattggtagagacccagatacggggcctggaaagagctaagtgttgggtaactatgctattcgctctgtatcttagcattcccatctgccaagaagagagccaatggggctgagggtttctgaatggcaagtacaaggtgaatgctctgctgctgacctccccaaggtgccaggggggagggtcaaggaatttgccagggattcttacagctcatcttgcatttcttcttttcttcccactcctgaagctcagatttcaattgctgcagcctcttcttgtttgagtactccaagatgtcgatgatggtctgcgggaggggtggagtcaactcacccacaggctctgctggctctcagaggcggccacccagcacttcctcagaggagtccccagtcccaacctcactcccagaaacctgaccagaggctaatcgggacagtaacagtgtccacccatagggttgttgtaaggactatataaagacatacagatcgcttgctattacacgtagaggtgtttgcaaatgctgttggtggtagcagcgacctctgtcgcaccggtacagtatgtgcccggtgaaccccctctgggacgggtgctatggtgccgcatttcacagagctcggggaggcaaagttaactaaaagtctcccggccagtgagtgctggcgcgctgggatgaaacccatctcggtcctcttgcaaagcccaggtgaggggagtgaagggtgaagaaatgcgtcttccaggtggaggaagcaccacgtgcagtgggcggggaaaggcaggagagggcgcgcgagtgcgcggagggagggcgggacggagggagggagggcgggacggagggagggagggagggacggagggcgggacggcgggagggcgggacggagggacggagggagggcgggacggagggcgggagggcgggacggagggagggagggagggagggacggagggcgggacggagggacggagggagggagggagggacggaggttgggacggagggacggagggcgggcggatgccgcgggtctcaccgccagggtgtcctgctgctgcagcagggcccgcacgtgcagggtcgtgctgttctccatctcctggatggtctcgatcagctcccggttgagcttgctgaggaagttctcacggcttcggagctctcgcagagcggccctcccgctcctgagcgaggtctgcgggcggagggaagagcagagaggcggcgctgcgccctgcccggcctgagcccccgaaagcccgtggacccgccgccccggccccgccagacgcccgcccccgtgcggcctcctgctggtaaacgcggcccaagctgggcggttccccattgtctgcgccgcccgggagctccgggactctcatccgttcggaaacgcacgtgtacccatcatctcacatccctgaggtgcgggtgcatctacagttggtggcgtgtcaccaactaatcaacaaatatattattagtgggtaaataaagatgtgccttcatatcaatggcttctcagaatcaatgaaatatagaaataatagtaagggccgggcggggtggctcacgtctataatcccagcactttgggaggccaaggtgggccgatcacgaggtcaagagttcgagaccagcctgaccaacatggtgaaaccccgtctccactaaaaatacaaaaattagccgagcgtggtggcgcgtgcctgtaatgccagctactggggaggctgaggcaggagaatcgcttgaacctgggaggcggaggttgcagtgagcgagatggcgccactgctctccagcctgggcgacagaggaagattcctgtcccaataataataataataataaacgccccaggtaggttaagaaggtggcagagcgaccgccatgtctggaggagaagcaggggaggcaaaatggatgataaacgtcagcatttccgggcaggccgcggagtcaatgagtactctcatttcacacaacagcccccagtggaacaaggagggtctgagggttaagtgactcgcctaaggttacacccagcaggtgcataaaacctacagtaacaacaacaacaacaattgtacttccctaaggttacacccagcaggtgcataaaacctacagtaacaataacaacaacaattgtactcccctaaggttacacccagcaggtgcataaaacctacagtaacaataacaacaacaattgtactcccctaaggttacacccagcaggtgcataaaacctacagtaacaataacaacaacaattgctgagggccctctacatgccaggccaggtgctgtgccttgctctgcaggtggcacatggtatctgttcaccctccaacagctttatgtttactaactctattttgctgataaatggaggctcagagagtttaatgacttgcccagtgtcacacagtcaagaagtggcagggctggaactggaaagccagacttctgaatcccaatgtctgtctttccgttatgctaaaacaagaactgagtagccttaaaactgcaaggcatggctgaaccacgtagtgactaagacttggatgttgaacctagacacaccttggttcaaatcccagctcagccacttaccatctaagagaatctgggcaagttagttaatgtctcagagcctccttatactcattctaaaggtaaggaaactagtatctgttttagagaactgccgtaaaatataaatgagattggacaggtgcggtgactcacgcctgtaatcccaacactttgcgaggcccagatgggaggatcactcaaggccaggagttcaagaccagcctgggcaacatagtgagacctcatttctacaaaaagtaaacaaaattcgctgggtgtggtggtgtacacctacagtcctagctactcaggagtctgaggtgggaggaatgtttgagcccagaagatcgaggctgcagtaagtcaagattatgccaccacactccagcccgggtaacacagcaagaacttgtctctaaaagtaaataaataaataaataaatacaattttaaaaaattaaaatgttcgctgggcatggtggtgtgcacctatagtcctagctacttgggaggctgaggcaggaggatctcttgagcccaggagtttacggctgcagtgagctatgattatgccatttcactttagcctgggtgacagagcaagaccctgtctttaaattcacaatcaagccacttagtgagagtgcactcatgtgcactcagtgaacaatagctgatactactgtctctggctctaaccctctacccctgccataaatatttgctctttcatttgttcctgtacttcctcatttctccgtcctttactaaaaacgaccccttcctagccctcagctcctttatttctcatataacagtaatcatgctgatgtgctgagtgcttgccatgtggctgatactgtactaagcacttcatgcgcactgcagcacatcaccctcacagcaagactaagagatgggcactattattaggccaactttataaaagtggacagcagtcgggcacagtggttcacacctgtaatcccagcactttggaagagcaaggtggaaggactacttgagcccaggagttagagccctgggcaacaaagggagatcccatctctacgaaaattagctgggcatgatagtgcatgtctatagtcccaactactccgagaggctgaggtgggaggatcacctgggctcggaaggtccaggctgcagtgagccatgatcatgccactgcgctccagcctggatgacacagcgagaccctgtctcaatcagtcaatgtggacagcaaggattaaattcagtaacttattcaaggtcacacatagcagagctgtcatccttgaagtcttgcctcctagccactccactaccttgtctccacatctccagaccaaaatacccagaagtatcttgtgaaaaatgttattctccaagtcctgggcccactgaaacagcagcactagggtttcagttcaaatgtcacccaccttagcagcctctcgttagcacctaaacaattactgccacactctcctccgtgcctccagccccctaaccttattcttaggcttctctttagctcttatcatcatttcaaatatctttctcttgttgattgtcagtctcccccatccaatagaatggaagtcccctaagatcagaggtcacattactggtgaaccctcatactcagaatagaacctggcacatggtaggtgctcaatcaatatttgttgattcattaaatgaatgaaagattgcaagagacagtattaagaactggactggttaggagcacaagttttagagccaaattgtccacgttcagcttctacatcaatcaaaaacacctaaacccctctaaagttaggataaaaataacagaaatggctggaagcggtggctcacacctataatcccagcactttgggaggccaaggcgggcagatcacctaaggtcaggagttggagaccagcctggccaatatggtgaaaccccatctctactaacaatacaaaaaattagctgggcgtggtggtgggcgcctgtaatcccaggtactcaggaggctgaggcaggagactcactcaaacctgggaggtggaggttgcagtgacctgagatcttgccactgcactccagcctgggtgacggagtgaaactctgtctcaaaaaaaaatttttttaaaaactaagagaaatatgagttcctcctttaagaatactgggctacctctaaaccattttgcaagataaaaggttaaaggggaaaaaaaggtttcaaagcaaattatattttcccttgttctttatatagtagtcattgttcattgagctattaaaaattttcttgaagaattattctatagtattttgtagtctttataatacttagtattttactttctgctatgtatgctaaggacttgtcttcctttaggcatttcaaatactttgagacattgttcagataattacagaagccataaaacaatgtatagcgaggaaattaattacctacaattgtagcgattgatgtgaaaattttcattgtcagtttctaaggcttgcttcaaagtacactgtaagaaaatttaatttactggaattttttttttttgagatgaagtctcactctgtctcccaggctggagtgcagtggcaccatctcagctcactgcaacctctgcctcccaggttcaagccggtctcctgcctcagcctcccgagtagctgggactacaggtgcgtgctaccacacccagctaatttttgtagtttgagtagaaacggggtttcaccacgttggccaggctggtctcgaactcctgacgtcaaatgatccacccacctagacctcccaaagtgctgggattataggcatgagccaccacacccggccaagttgctgcaaattttaagataaataagccactagatcgtgttcctaatgcaacaaaataacaagcaattctgattatttcttgagtcttaaacagaacagcaaacgctttgtttaactggctttgacccctgatcctgccatttcctggctgtgtgacctggtgcatgtcatttatctccctgcgcctcagtttcccggtttgtaaaataggaacaaggataagcgtgctcacacagttcctgtgaggaagaaatgagtcaagtctggcacccacaaagttctcagcacatgtttgctacagccatcatccccgtccctgtcctgggcccagtgtccagggaagatgtgcctcataccttcattaaccagattttggcatgcatcttcccagggtccaacttccgccttctatgtagttctcttggattcttcggctggcagcttgtcaccaccgtagtgggcttgaagtgaaacactaggggtagacaggaaaggacagggagagagtgagggtcccggaaggcctgaggccaggttcccgggagtgcaccattaatgagaggagggccagaccccagctccaccctctgactgccttataatgtgacactagaccgagggtgaaattcacacccttcactaagctcccaggacagactctgggcctcaatatgagggagggacaagcccaggtgaaagcagtaactatggacatggacagaggggagggcagggcagccaggaaccccgctctcaaatgtccagtcagaaagagagtcgggaactcccactccttgtgtctttccagtagctactgcagcacaggacagcagaaagaccagagtctggcaggcctgaatccaaatccctgctgtcccaccaacctggctggcagaaggcctgatggggtaggggttaagagcaagaactaatgagccagacagtccaagtttaaatccaggctcttggccaggcatggcggctcacgcctgtaatctcaacactttgggaggccaaggcgggcggatcacctgtggtcaacagttcaagatcagcctggccaacatggtgaaaccctgtctctattaaaaatacaaaaaatgagatggacatgatgatgggcgcctgtaatcccagctacttgggaggctgaggcaagagaatcgtttgaactcgggaggcggaggttgcagtggtgcgagatcccgccactgcactccagcctgggtgacagagactctatctcaaaaaatatatataatcataaaaataaatttttaaaaattccaggttctgccttctactagctgcgtgaccttgagcaagtcaaatgacctctgtgtccctccattcgtccacctataaaatgggaataatcatcacgcccacctcatagagtcttcctgaagatgaaagaagttactataccttaaaggtgtttggaatagtgcctgatgcatattcagtgctggatacacattaccagttgttactcttacttctagtgacctgagaagtgggaccacaacaccagacgaaggcacagcagccacgcaaaactccaactggctgtctctgaaacactctaagggctgtggttctgccagataagagtacaggcatttggggggcatattctcagaatccctgtttcctctctgcctgtcgtgcaatgacatgggacaaatcgcccaggtggatccagctgtactctcagtcctcaccaaaatccctgcttcaggtacaacccagctcatctgggagagatactaatctctttaatagatcaatgtccttcatcctgagaaatgctggcattaactatggagatgattaagtaaattaattttgtgtttaatttataaattacctgtatatatccggtttttagttgtattgtataagagatagaatgattaataggttaatcttgtgattctaattttaaaagtgtaagtgggattttgatttagatttaagttgaaaggtttaatacactcttattagctccgttgcccaggctggtgttcaatggcgagatctcggctcactgctacttctgcctcccagattcaagcaattctcctgcctcagcctcctgaatagctgggataacaggtgcccgccaccacacccagctaattttttaatttttagtagagatgcggttttgccatgttggccaggctggtcctgacctcaggggatccacctgcctcagcctcccaaagtgctgggattacaggtgtgagccaccgcgcccggccagattacccatatttagaagtttaagtattagatatacaagaattatgtaaatacccaatggtttttgttaatcagacaagtgaaccatttgaaaatgaaaatgaatacgttaaaatttaagatgtggcttaaaaggtttaggagaatttaattaaccaagttccaaaacccccttacaagtgtttataaaaattgtaagattcttaagttgaatttaaatgcttaaggaagatttgcagttttaataatgaggatttattttcattattggtagtagccctaatttatctttttttaaattaaatcttttattacaagatagttcagattcacaagcagttttaagaaataatacggaggggctggccgtggtggctcacgcctgtaatcccagcactttgggaggctgaggcatgtggatcacctgaggttaggagttcaagatcagcctggcgaacatggtgaaaccccatctctactaaaaatacaaaatttagccaggtgtggtggtgcacgcctgtaatcccagctacttgggaggctgaggcaggggaatcgcttgaacccgggagttggaggttacagtgagctgagatcacaccactgtactccagcctgggtaagagagacagagagagagagagactctgtctgaaaaaaaggaaaggaaaggagaggagaggagaggggaggggaagggaggggagaggaaaaggaaaagaaaaagaaaaagaaaaagaaaggaaagaaaaggaaacagaggtagtctatgtaccctttacccagtttctcccagtggcaacatcctgcaaaagtacggtacaatatcacaaccaggatattgacattaagatgagcaagatataggactttcccataaccacaaggatcctgcctgtcgccttctacaaccacacccacttccctccccttaccaccctcctcacaactctgtccctaacccctgcaatcactaatctgctctccatttctataattttgtgatccccagaaggttatataaatggaatcatccagtatgtaactgtggggattggcttttttttacttggcataattctctggagattcatccaagttgttgaatatatcaatagttctttcctgtttatcgctgtatagttttccacggtggggatacaccataggttgtttaaacattcacccactgagggacttcaaggttgtttccagttttgaggaattatgaacgaggctgctatgaacattcacatactggcttttgtgtgaatataagttttcatttctctggaataaatgcccaagagtaaaactgctgggtcggattactaggaagtgcatgtttcatgttgttagaaatggccacacttgtttccagagaggctgcatcattttaccttcccaccagcaattgcgcacaatctgacgtctcctctttgctagcatttggtgttatcactatttttttattttagccatttcgataggtgtgcagtgatatctcactgtggcttaatttgcattgccccaatggctaatgatgttgaacatctttttaatgtgcttatctgacatctgtatatctgctttggtgaaatgtctcttcatgtctttttcccattgcctaactgaattgtctgtttcactgttgagtttttactgttactgatatattctacatagtagtcctttgtcagatacatggtttgcaaatattttctccaagtctatagcttgtcttttcatcctcctaaaaaggtctttcataaggccaggtgcagtggctctcacctataatcccagcactttgggaggctgaggcgggcagattacttgaggtcacaagttcgagaccagcctgtctctactaaaaatacaaaaattagccaggcatggtggcacacgccttcagtcccagctactcgggaggctaaggcaggagaatcgcttgaacccgggagacagagtttgcagtgagctgagatcgcaccactgcaccctggcctgagcaacaaagcgagactccttctcaaaaaaaaaaaaaaaaaaaaaagtctttcacagaacaaaatttttaattttgatgcagtccaattcatctatttttcttttatgggtcaagcttttggtgtgatacctaagaactcttcacttggccctaggccccaaagatttttctctcctgttttcttctaaaagtttttcagtttcacattttacatttaatttctattttattttatctttgagctaatttttatattcgttgttaaatcatttctttctttttctttttctttttttttttttttttttttttgcctatgggtgtccaattgctccagcgccacccatggaaaaggctttcttcctccactgaattgtttttccactttctgaaaaacccattgggaatattggtatggatttattcccttttcctcactgggaagtgttggcagtgtccagcaggtagctgatccttcattccctgcttggtggtgctgattccccaactgggatagtgctggcagggatgagtggggaggtcatcttctaacccccacctggcagaagacagtgctctgactctctctctagggtagtgtcaacagagtctagcagtgacaagatttcatgaagtgtcatgaggtgggactcatcacctctgggcttcactcccctcccccagcctacctatgtcagtagagcctggtgggagcctgagcctctatccccacccagcatcagtgaggtaaaataaggtagtgagatgcagggcaacttggcattctactctcccatctcctttctgtgtttcagtgttgcccacaggggagctgatctaacattacttactcagaggcaatgaggtggtatgagtgattttatacatagatgtatacataagtatgctagattgtctatgaagttcatttcaggataccaaagaaatattacaaaatatttgttattaattctcacaacaatcctaggtggtattagtgtccccatttcacaaatgagaaaaccaaggctcagagagatgaatgatttttccaagtgagtaaatggcagagccaaaatctgaccccatgtctgcctgagcctgacccaaggcctcggaactcccctgtaaagcatgataatgatgtggcagagtttattctacgatttcaccaaaccttgttttcttttcctcctggaaaaacagatggactacatttcccaccttcccttgtggttagcagaggtcatgtggctaaattatggcccctgaaacatgagtaggagtaacatttgtcacttcaaatctggaccccccccaaaaaaaatgcccacataattgtccatgttcttgttctctctcttccctctatgccagctggatgcaaaagtatccagcagaagacttcaagaccttacaaaatatcagacccacaaggtcaaaggaacctggatccctgaatgaccatgtggaacagaatccctccttcctcagatccacaaatgtactgtggcataaatgagatataaacttctatatcaatacttgcaatttgggcattgtttattacatcagttagcctaccctaatataagtggtgtcaccaagagccaaaagcagccactctatcctgtctccaacccccacaccagctcccaggtgcctccgcccacctggttggaccctagtcaaagtcttcattttgcttgtatgaaggctgttggcttgttggactggaggcagagtagatggcttggtttcctgcttggactgctgccatggaacataatcctacaaaatatacaatcagtcacatagcaccatgagtttatatcccagctctacccttttcagatatctgtgaccccaagcaagtgacttgacctctcctgagcctcaatcttctcatctgtaaagtggatctaataataaaacctacttctgtggattggcgcaagaattctgagagatatttatgaagcatgtggtaagtgctccataaatgttagctatcacttttttaaatcagccagccagaatttactaagcacatccaggctgtgaggtgctaagaactgtgagaaacagaaggcatggaaaagacgcagacatccaccctcaggaaaccagagcagcaatcagatgaataagagagcagcataatatacccttacattctgataagacagtgagaggagaaaaatgaggttctgaggcttgctctgggtcccacagcaaagtgtgacccggctgggactggaattcgggtctccagcctatatccgcggagcagtcacgaccgtgagagtggagagcaggtggactgcagggccagcgagcctcccaccccagccctagtcccccaagactcaccggaacctggaactcctggactatggagtgagtcccagagtgcttgggtctggaaagagttgggaagggaaagaacttccattatccccagcccaaggggcagcaagcagcaattcgaaacaggattggagtctcgaaccagaaactgcagtttaccggggacaatagccccgcgggagtggggcggggccaaggagatgtgggcggggagaggacgggggtcagaagaccgagggcgacctcgaggcgagggcgggacagcggcggggtgtgaagtacgcatgcgtattccgcctttcttccaatttttttttttttttttttttacctacttttgtaagacatgcgccattggggaaaatggaagagaagttgcgagtctgtgagaccctgatcttctggtataactactcggcttttccaacttccttgtctcagtgtagatcgcgcggtaacccaggccactcagaagtcccgagacccgatgctttcgccagcgtctcggtctccaaggaaacgcgacgccgcctaccgagcgcctaaagggactaacctctcaaggcaaaatctagttcggcccgcttttcaattttcaaattcccttcagtttgctctgcccataatcctaaaatatgatatcatatttctccactctcatcaaacttccaccatttccttcgccatcttcactcttggctaatgagtttgcttccaattttactaagaaaattgtgggaatcagtaaacccacaagttcatggcatcatttactcgcctacttgcctccctcccgtaactacgtataaactgcctactaagaccaattcctacatttatgcaccgaatcctatcctctcacgttttctcaaagatattggccgagcagttctccccgttttttcctcctcttttctctctcctttgtatcatcagtataccaacgtatttttaaatttcttctatttaaaaagattgtccacagccggacacggtggctcatgcatataagcatgagagcactttgggaggccagaggtgggaagatcgcttgagccagaaaggtccagtctgcagtgagccacgatccagccactgcattccagcctggttgacagagcaagaccctatctctaaataaataaacaaaccacttcccctccagccagctcccatttctgcttcattttaaagcaaaactcctagagaggtttgcctactctgtttcccatttttttccctcctctcaatcaggctttcactccccactgaaactgccctcgtcaacatcattggtgacctccactttgctaaaccccatggtcacttctaggtcctccctttatttggcctgtctgcagcatttgacacaacagatcactccctcccctgaaacactttcttaacttagtatccaggaaaccactcttgagttgcttcctgcctccttttcagtctcctttgctggttcctcctcttctccctttatcattgtagtatcccaggactcagtcccagccccctcccttccagtctcatggttttgaataccatccgtacccagatgcctctcagactcacgtctccatcctccccctgaattccagccatgtacatccaactgcctgcttgggccccttataagcaactctaatgtgcaatatttttccagaaacatttttcccgaacttaaaatagggcatctctcttcttggaatcatccttaactcatctcttatcccacatccatcagcagatcctgttgcaataacttcaacgtatatctggaataggaccacacatacacacacacacacccctctttccttttgtaccccaactaaagtactagttcccacccttgccctacaccaattctctctctacacaccagatttgctagatagagcacggatttaaaagagaattccagtttaaaagataattgggcgggagcaataattttaaatcacttaaacttcaataggggaacattgctatagaataccatgtcagagctcccaaccttttctgcctcttaaaaatcacaggagaatgtgtttaaatgcactgtggtaaatagaagcagctgctaggataaaaagcaattagcccaggtactctggctattcaggcccctcctggctgaccctagagctgagggaatcactgtgttgggtaccctcatttgcagagcacaccatatgacagcactcttgctgggcaactctgtaccaggaaaccattaaaaagtaaaagataaaggccgggcacggtggctcacgcctgtaatctcagcactttgggaggccgaggcagatggatcacctgaggtcagaagttcgagaccagcctggccaacatgatgaaaccccatctctactaaaaatacaaaataggattagccaggcgtggtggcgggtgcctgtaatcccagctacttgggaggctgaggcaggagaattacttgaagcagggaggctgatgttgcagtgagccaagatcacgccactgcactccaacctggacaacaataatgaaactccatctcaaaaaaaaaaaaaagtaaaagataggaatacatgacagatccaggtagtgacttactcaacagccattcctccccatcatcgcaactattggatcctgatcttgtccatgtatgcacttgccttaatggaggcaggccccaggtccagccctagtcctagtcccagctccaatagtcatgactgtctgaggctggacttggtgagccaatttccctttccagttagaggtctagtcatagatacatgatgaaagtctggctaagaagacaggatgagaaatctactcaaaggcttttgggaaaggttttcatcacacttttaaaaaaaggcattgcagaaaaacattccttcatctgctggtagacattgtcatatctgtgtgggattcctggaatcgcggaactgtgaggggagttggccaaagaggatatacagtgaatggtagagaggaaaatgtaaaaaccttcttccttgatagcactgttgagccattaaattaaccaaccctagcctggcacaatagtatgtgcctgtaataccagctacttgggaagctgacgcaggagcatcgcttgaggccaggcatttgagatcagtctgggcaacatagtgagaccacatctcagaaaaaaaaaattttgttttaattagccagatgtgatgatgtgcacctgtagtctcagctacttgggaggctgtggtgggaggattgcttgagcccatgagtttgagactgcagtgagctatgattgtgccactgcacgccagtctgggcaacagagtaagattctgtctctaaaagaaattaattaattaaattaacctttcacctatctagaaaatacttgagattaaataagaaatcacattactgggtgagcaaatttgagttgagttttctggtacttgcagaccaaaagcattttactgaaccctacgtctggaggaacaacaagatagaaggaacctgggtgggtccctgacaaccttgcaggagaaagtcacctacctgtccttactgcctgccaaattccgagctgcttcatcaaagagaaataaacctccaccttgtctgagaccctgtatttgagagtccctttgttacagtagcttaacctgtaccttgattaatacaaagaagagcttggccactgtcagacagccttcctcatcagacatgctgacccagcatggacacccactgagagctgcctgtgccccacatctcaggtacttaaccagtaatattactgcctcccacttcaatttttttttgtttttgagacagagtttcgctcttgttgcccagactggagtgcaatggcatgatcttggctcaccacaacctctgcctcccgggttcaagtgattctcctgcctcagcctctcgagtagctgggactacaggcatgcgccaccacaaccggctaattttgtatttttagttgagacggggtttctctatgttgctcaagctggtctcgaactcctaacttcaggtgacccgcccgccttggcctcccaaagtgctgggattacaggtgtgagccaccgcacctggccccacttcaaatttttaaaaaaaatacataaaaacatttgcaaaaatgctgccatcttaatcaaagccaaaacacacttgaggggccactgacaatcacctgtaacaaagctgttggaactgggattgaatcagatggggtccatttgcacttacacctgttcaggtggcatttctgtgttcacgaacacctgatggaacttcctgcccccaggataggtgggcaagatgagctggcctttcctccctgcacatgtgaggtgataaatgtgatagagggcctctcaggcctgcttggctccaggctcagcaatggcaacctgggctctgattccatcaacatcttgctgagaggtggactaggctgagcaggcagtctcgggcttccatccatgtcatttgatgtgctggctttgtggcaaatgtgcacagcatcctaaacccacaatccctactgttgtcactgggtaagatgccgtggttcttgtggagacacctgctatactcgacataacaagatcctagacattccttcttatcatctgcacagccctccagagctgctctctccatacggcctcagtgcccatccggactgctctccttgcagggtacctgcctggcccctgtagctcctgatgtaataatctctgcaaaatttgacctggaaaaaatgaaactgaccaaaaggatggccctacacataccaatgaaattgtacaacagaagaagatatgattagcaaaattggacatggagccagaacctaatccacaagtcaaatattttcaaaatacagacagatgcctttaaagtccaacacaaaacaaaaatgctcaaaatacgttgattatatgagagttcctgactagtgcagtaagacaagaaaaagtataagatttgaaaaaagagacaaaaccttcattattcacagacgatatgattggcaatacagaaaagtaaagagattccaaaaaccactggaaattttttaaggtttcaactttgttgccagatatggggtcagtacacaaaattcaatcgtgtttcctctaacggacaccaacaaaccatatgtaacttctgatttacaataatttcacttacaatagcagtcaaaccacgtggtactttggaataaatccccaaaagtatgtaagacctttatgaagaaaactataatattttattgaaattcataaaataaggcctaaataagtgagaaatcaagtggggtcattgatggaaagactccgtgttataaagtggtaattctgtacaaatgcagtgcaacgccaattaagatctcatagtttcctggaacttagtaggcaggttgtgaaatttatatggaggttccaaatatagctgagaccatcttaaagaagacgaaagagagagaagaatgtttcccataaaagaagaaactggagttcagatttctctttggaaactgaaagatccccccacagtggaccctcacttctggagaggaatattcagctacagttgactagcagttgccccttcagatagaatattcgatctccagttcacccagtatatcttctacttaaggcacctgcctgacccttgcagatatttgattatgtgatagttacctggagtgagggcttaagataagaggaatggaagagattgtttaaaatacatctattgtttggttgtgtaagtattctcctcatggtgaaacttgaccaggcaagtagaaagaataacagagaagtatgtgaatctaagacattgatgtttctggtaatggtgaagttccgagtatgatcacgggaatgcgtggctgagaagggataaaggaaatggtgcctgaggatataaagtgagaggactggaaagtgcaaacggcccaagtcagtggctcccctgagaccaataccagcagttgggatgaagggaatctgcctgttaacaaggtttcctaggatctgatgcacagttcttgatccacggcgtcagaaataaagtggttaaataaatataagctaccggccgggcgcggtggctcacgcctgtaaccccagcactttgggaggccgaggcgggcgatcacgaggtcaggagatcgagaccatcctggctaacacggtgaaatcccgtctctactaaaaatacaaaaaattagccaggcgtggtggcgggcgcctgtagtcccagctactcaggaggccgaggcaggagaatggcgtgaacccgggaggcggagcctgcagtgagccgagattgagccactgcactccagcctgggcgacagaccaagagtccgtctcaaaaaagaaagaaagaaagaaatataagctacctatacgtggggctgcctattaactccgccaagtgacttaactcctgcctctttatctgtaaaatgggcataattacagcattgtttttggaagattccatgtaataaagtctgaagtgtgcttaacacagtactgggaacttaagcagcactcacacttcatcctaaatacgacgaaagtcttttcaaaaaaataaaaattaatgcaatatgacttacttggaaatgtatcaaaaaataaagaccgatgaatggatcgaggcgtagtgtgacagagtaaaattttaatgataaaaagttaatggtaaaatgttcactgtaaaactttcaacttttcttcttgaaaacgtgcataatccgacgtgggaaaaaaaataacgcattgcagtcagttctggggaaacggaaagctaagttttaattttgctattgcttttgcttttttaacagaaaaggtacaaaaaagaaaaaatgggagagatgttgccgaactccgtcccgcctgtgggctgtgggccgttagcaaagctgctagcatgaaatcgtcgagcaccgcttgcgaaacgccaaatcctcgagagcgaggccggaggctgccaaacccgcgctggggaaagggccgcctccgggcgccccatcccgctgcggacggaggtgaggttggagcgagcgctggcggaagagaggctcagcgcagggggcgcagagccggcgctggccaatatgcgccgcatgtgatacctttgagggcgcggcgggggagggtagcgtcaaatttcaaaaaaaaaaaaaaaccaaacccacacagccccggcgggcgggcgcgcgcgatgggcgccctttggctgcgggagcgagtggaggatgctgggaaggaggtaaaatggccaccggcggcggcgcggaggaagagaggaaacgggggcggccgcagcttctgccccccgcgcggcccgcggcccggggcgaggaggccgacggcggccgcgagaagatgggctgggcccaggtggtgaagaatctagccgagaagaagggcgaattccgcgagccgcggccgccgcggcgggaggaggaaagcggcggcggtggagggagcgccgggctcggcggccccgcgggcctggcggcgccggacctcggcgacttcccaccggctggccgcggggatccgaagggccgtcggagagatccggccggcgaggcggtggacccccgcaaaaagaagggcgctgcggaggcgggcaggaggaagaaggccgaggcggcggcggccgccatggcgaccccggccaggcccggcgaggccgaggacgcggccgagcggcccctccaggatgagccggcggcggcggcggcaggcccgggcaagggtcgcttcctcgtccgcatctgtttccagggagacgagggcgcctgcccgacccgggacttcgtggtaggagcgcttatcctgcgctccatcggcatggacccgagcgacatctacgcggtcatccagatcccgggcagccgcgaattcgacgtgagcttccgctcagcggagaagctggccctgttcctacgcgtctacgaggagaagcgggagcaggaggactgctgggagaactttgtggtgctggggcggagcaagtccagcttgaagacgctcttcatcctcttccggaacgagacggtggacgtggaggacattgtgacttggctcaagcgccactgcgacgtgctggccgtgccggtgaaagtgaccgacaggtttgggatctggaccggggagtacaaatgcgagatcgagctgcgccagggggagggcggggtcaggcacttgccaggggccttcttcctgggggccgagaggggctacagctggtacaaggggcagcccaagacatgctttaaatgtggttcccggacccacatgagcggcagctgcacgcaggacaggtgcttcaggtgcggggaggaggggcacctgagcccttactgccggaagggcatcgtgtgcaacctctgtggcaagcgaggacacgcctttgcccagtgtcccaaagcagtgcacaattccgtggcagctcagctaaccggcgtggccgggcactaaacacccgcctgcctgccagggtgaacacacagccagcttatccctcttaagtgccaaaacttttttttaaaccattttttatcgtttttgaaggagatctttttaaaacctacaagagacatctctctatgccttcttaaaccgagtttactccatttcagcctgttctgaattggtgactctgtcaccaataacgactgcggagaactgtagcgtgcagatgtgttgcccctcccttttaaaattttattttcgtttttctattgggtatttgttttgtttcttgtactttttctctctctccttgcccccctcccgccctccccgccccataccttttcttcccctggattttcaccctttgggctgccttgctcatctttatgccccagcactaggtacggggcccaacacgtggtaggcactccatcagtgtttgctgaattgaaaacattgttgactgtggcttctatcagagtgtctaccttttgcagctcttcccctccctcatttaatttgctgcttttaatctacgtggtctgagaatttgtgaaaccagtgttgttagaagtgtatataatctgaatcaataagctctgaatggtggccaagggcctctcttatggcacaaagatgcatggacttcatgacagctcttttggtggctcagaagccattttttatagaatcatggaatctagaatattcctgctggaaagaacctgagagttggtttggaccaattccctggttttccagcagatgaaacaggcccaaagaggttaaatgactgggtgaaaatcacatagctgtctggtgccagagccagcctatagtagagtcccctgaccccaagcccggtgctcattccactacctctcacacttcacaacaatttcctcaacacttgagggcccagaaagtctgatctctccagaatgatcagcccagaggaatgctgagaaatcacctggaggagggagcagaaagagaaggtttttaaggaggggcttctgaatacttgggagatacggaacggaccaaggaccacactccagggtgcattcgttgctccctggggcaccacttctggattacagtgtgccaggtcctttggaggccctaccccttccccattcattgccaccagtgagaaatgggggtgcccctgtgtaaagaaacctaccaaaggtttacatttgcaccttagcctcaatagctacgaaccctagagaagcagctagctggagctcatgtgcaactcctgattctcaggagaaagatggattttaacccaaaattatgagtgagctgttaactctaaaatgtacttgggagataggccaagcgagaggtcatgggccaactaagtgttatccagtagaaaagacagtacactgcttttcttttagtgtttgcttttcctttgctatatgttttgctatttccttgtggcttagaatgtaaaattgattgttaaaagttttgttctgaataaatatttatcttttgtattgctaaaactggtgcactatttcctttcaaagtgttagatgcacagttacccagctccagaccgtatttcaatcccacttcccctacactccatttgtttaccttgctaaatacatttcccacccctgcaggcaacacttagcacctactacgttgtgccggtccctttgcatcacaatcagcacactgttaaaacgggttttaagtcctaacacagttccaataaatcagaatcactgttagaggaagtgaaacattttagttaatcatcctcaagcaattctgatgggcagccaggtttgagaccagagtataagatgtgtgagctgaaccctgccctcagggagattacagacctgtgggaaagagaggtggtttgccagcttcctcgtctttctgttactgtaagcgcgcgctgtggatgggatgcaaaatattcttgggttctgggaaaatgccatttcttccagctgttgaaaaagcgggatccagggagctgacttctccaagttagcccccactggagactgggcctgcaggcagaatagggtcaaggtccctggacttcaggtccaataccctgcagaccccagatacaactctctgaaggattttccagctggtgatgctaggatgatctgatcctgagagttaaacgttcccagtatattgactctgactcagtgatttgaggatatttccagagctgatctggagttgggacctggtaggctcttgggaatcctgtctttcagagccagttcaacccctctccttgtctcccaaagcaagcagactctcccctccctcccatccctctttcccgtctttgccagcggtttccctccctctcacagagctggaggccaggggccaggagaaagcctgcattcaccatactctccactccgttcctcaaagcaggcactgtgccagggagcctccttgaaggaaccttccctctcctggccccatccccccactctccaggagggaggagaggaagaaactgtttccctgcccatcccccacaggatctgcttcaaggcctcctgcctggtggcccagggacagccaggggctggagctgaacaaacctcccccagcttcctttcctgatcaagcagccctcaaattacaattcttcactgtttttgggctcctggaaagtgtgcagagatgcccggactgaggctggttgactaggggacattgattcattccacttcaacaaatacggagggcattagagctgggccccatgcaaggccctctgcataggctgccttgaacaagacagtgcacttgcaatggaaggtacagataagtaacagtaggcaatgtttacaatcatatatttaacaatttttttttgagacagagtctcactctgttgcccaggctggagtgcagtggcatgatcttggctcactgcaacctccacctcccggattcaagcgattcatgtgcctgagccttccaagtagctgggattacaggcacgtgccaccacgcccggctaatttttgtatttttagtggagatggggtttcagcatgttggccaggctggtctcgaactcctgacctcaggtgatccacctgcctcagcctctgaaagtgctgggattacaggcgtgagacaccgcacccagccaacatttgtcctgtatagaattgtctgaagtaaaggtttccctagaagagaaaacgtcctgactgaaacctgcaagatgagtaagaaccaggctaagagtgaagagacagccaagcagcagaaatagcagatgtagaggcctggaggccagagagcacacagcgtgttcggactggccaagagtcaggggaagatgtggctgggagaaaacgccgagaagaggtgtcacagggcttaccagccatatttaaaaacgtggattttgtcctcagagcctccaatcaggcctcctccattccattcattctttcaacacatgcctgttaagcgccaactctataggggccttttctaagcgatggaacacagcatggagcaggataatcaagtccctgaagctcagattctagagtcacacaagtacataattacagacgatgatgcactaaaagaaacatacagggtgagatccctgtttaacaagcaaagctgatccagtcttaaggatcagagaaaatgtttgaactgagatggaaaagacataaaaggagttaatcgagagatggggctggggattaagggatggcaagggtattaacctaggcaagagggatagcaagtaaaacaaccctatagtgggaggaggcatgaccacttctagagactaaatgaatcagtctaagtttagaaacagaaaccactcttgctgttgaagaaaatgctggtccctgggctgggtattaggaatgactcctagaacaccatagaactgccaggggagttactacctctcacagtcagaaagacagaagccaggaggccaccactggaaaggctgagcatgaggacacaatggtgaagctgccacccaaagacaggatcctgggatcagaaagtcactgccaatgccactggcaggacagtgaaatgccaagtcctttccctgcctctacaaagccagggactgtgcactactgtctccgcaaccatttacaggtaaaaacagcccaaactgtctggcttacttatgcctcccttccatcttttatgcaaatacatctaagtgctagagccctagctgcaagggagttgggagatgttttagctttccagcatccgcaacataggaaggcacatagaatggggatgggtgctgtctgtcaaaagacaatatccagcacaaaaaatgtgactgcagtgcagagaagaggagctcgtgggagcatctggtaggccatgttaagaatgtgggtctaagaacgatgtgccattgaaggacttgcaagcaagagagtaacatgattagattggttatgttttacaagcatcattcaggatagttggtggagactgggtcagaggagagcccaaggggaaatacagtatagttcacccaggtctctcgagagatgaggacatcttaggcatggaaggcggagatgtacagagagaaacagccgagtaaagaaatctttcagagtttaagtcaacaagatttggagctatatttgacatgggctgggagaaagttaagtaccaaggatgttgcccaggtttctagcttctgcagttggatggatggtggggcttttccctgagatgcgaaacagaagagaaaatccaagtttagggtgaagggcttgaatttgattttggatatattgagtttaaggtctccgtagaggatatctaagaggagatgtggagtaggcggttggatacacacagatcttacattcctaggagaattctggccctgagaaataaacacaggagttgtacagctgtggctttcaaactgttttaccacatcccacagtaagatatatattttacattgcagccatcatacatatgcatgtgtgtatttatatctaaatctgaaataagcttcctcaaacaatatttgccctgtgcatgatgcaccttgacactttctattccattgcttcatccttttgtcaatgcttatatgacgtgttaaactgatttcacactctcctaatggtcaagagagaaagcagaaggaaagattataccaactaagattgtgcctcaagcaactttgacacagttttccctgatggaaaaggagatggtgaaaaactaataagggacagccagaaagggagaaggaaaaccagaacgtgcagaaacacataaaccaagggaggacatttcaggtggtaggggttaacaattgtgtcaagggctgcaagaaatcaagtaaaatcagctctaagaaatgtcaattgaggccgggcgcggtggctcatgcctgaaatcccagcactttgggaggccgaggcgggcggatcatgaggtcaggagattgagaccatcctggctaacacagtgaaaccccgtctctactaaaaatacaaaaaattagttgggcgtggtggcgggcgcctgtaatcccagctactcgggaggctgaggcaggagaatggcgtgaacccaggaggcggagcttgcagtgagctgagattgagccactgcactccagcctgggcgacagagcgagacgccgtcaaaaaaaaaaaaaaaatgtcaattgagatcagaactgaagagtgccctaggattgagtagtgtggaggttatcaataagggccttttagaggaaagtgatgggggcagattaaggagcaaatgatctttctaagatgtcaatctggcacgctgaccattttattcccatgtcacgtcctctgggactcccttgtgcacttggaacccagcctggtacccgatccctttcacaagaggctcctggactcctttccaaccttactctcagccagattgcccattacatccctttatgtcaactccagttacggctgacaaacagcaaccagaaagaattttggagtatggagtggtacaagaccaagctaaggggccaggtgcaatggttcatgcctgtaatcctagcactttgggaggcctaggcaagtggatcgcttgaggtcaggagttcgagaccagcctggccaacatggtgaaatcctgtctctactaaaaatacaaaaaaaaatagccatgtatggtggcatgcacctgtagtcccagctactcaggaggctgaggcaggagaactgcttgaacctggtgatacaggaagggaagtgctgggaagggaagggcacagtccctttaaatgacatggaagggagaaagggcgtggtccctggctagggctccaccccagcctgtgcccatggacctaggtgaggacaggcatttttgttttcctgcccaaatgttgcatttcccaagaccaccctggccggccacgcccccatcctgtgcctataaaaaccctagcaggcagacacacaggtaactggacggctagaggagcacatcagtggaggaacacacaagcggctggacgtcgagaggaacgcaccgacaggcactgacaaaccagcacaccacaggccatcgaccaacagaactatgcagagtttggctggggcagtcggaggggagcctgggccactgaacagtccaactccaggggaaaaccttctcactccatccccttctggcttcctccatctgctgagagatacctccactcaataaaaccttgcactaattcttcaagcccaggtgtgatccaattcttctggtacaccaaggcaagaacccaggatacagaaagccctctgtccttgcaacaaggtagagtgtctaattgagctggttaacacaagccacctatagatggcaaaactaagagcatacggtagcataagcccattggggcttcaggagctgtaaacatccaccactagacactcgtggggtcggagccccacaacctgcccatctgtatgctcccctagaggtttgagcagcgggacactgaagaagtgagccactccccttgtcacacgccctgggacggggacaagggaacttttcccgtttcagtgggaggcagaggttgcagtgagccgagattgtgccacactgcactctagcctgggcaacagagcgagactccatctctaaataaataaataaaaggaccaagctaagggtgaggagacgtcagatcatgctgagttgagggtgggggcgccacaggagtgcaccaaacgtgtacaaaggcactgatacatacagccccatttgctggcttgtcaatgtgactaagatttggggtaggacatagtaaaagaaaataaacacagatatattatggaaaagaatgtaaactttgcagagttttaaataaaatatgactttttttttttttgaggcagggtctcactttgttaaccaggctggagtgcagtggctcactgcgtggctcgctacagcctacaactcctgggctcaagcaatacttctgccccagcctcctgtgtaactgagactacaggcacacaccaccacacccagctaattttttctttctttctttttttttttttttttttttttgagacggagtctcactctgttgcccaggctggagtgcagtggcacaatctcggctcactgcaacctctgcctcccgggttcactgtggatatatcccctcccgggatatatccatcactgtgcctggcacagctgcagcctcccaagtagctgggactacaggcacccgccaccacgcccggctaattttttgtatttttagtagagatggggtttcaccgcattagccaggatggtctcaatctcctgacctcgtgatccgcctgcctcggcctcccaaagtgctgggattacaggcgtgagccaccactcccagcctctctctttctttctcctctttcttctctttctttcttttctttttcttttcttttctttcttccttccttcctcctttccttcctttccttccctttctctctctccttccttctttccttccttccttccttcttctttctttctctttcttttctttcttcagggtctcaatatgttggccaggctggtcttgaactcctgccctcaagtgatccttccaccttggcttctcagagtggtaggattacaggtgtaagccaccacacccagcccaagaaagattttattttatttttttatacagacagggtcttgctatgttgcccaggctagactcaaactcctggacaacatagcaatcttcctgcctcagcctccctagtagccaggtgtgcacggaacaaattatatgtattaatatggaacaatctctaagacacattattaaatgaaaaaaagcaagatatggtatcctacagtttacattttttaatgttggaataaatacatacataccctcagcaccataggaaagattttaaaaaagaaaaaatatatatacatatgcttatttttgtacaaatatgtaacactggaaggatattaatgaaattcgtaatttgtaactttggagaactggatatttggggtttgggataaaaggaaagtttattttccactgtgtatccctgcttttaaaaaaatatttcatctattatctctaacaacaacaaaaacaacttttaacaacaaaaataaatgcaaaacacaagacttcaacgaaattcctatagactttagagagacaggagtccatctcctctatctttaaaagtaaaggccgggcttagtggctcatgcctgtaattccaacactttgggaagccaaggcaggaggactgcttgagcccaggagtttgaggccagctgaggcaacacagggatatcctgtctctacaaaaaaaaaacaaatcgttgggtgtggtggtacatgcctgtggtcccagctacttgggaggctgaaacaggaggatcacttgaggttgaggctgcagtgagccgtgatggcaccactgcactccagcctgggccgcagagtgagaccctgtctctaaaaataaaataaaataaaataaaaataaaaaataagaactttgatggaagagtttaagaaattctatagcagacaacacattggtctccctgcttccaggctccctctccttccaaccatggaatccaccccaaaacaaaacttgatcacatttctcccccgcttaaagaacttcaaagattttgcgtcctccctggtgttcaccagggcctgcctgaccagccctgcctcctctgggcctcctctcttgtcgggcctccccctcttaccctggcttggcttccccttctgctccagctggtcattcctggaagcagatctcttcctcccctacccatggttaatccttacctgcctggggcactcagctctaatgctgcttcctaactagagcctaccctaacatcctgtatcagaccctcttacaccgtccgttacctccctggcctctccttcagcagttactcgggtgcaatgatatacttatttgtgccatggtttgattgatatctgcctctgcctctccactttgagctccctgagggcaggaaccagtctcttttggctcacggttatagcttgagcaattagcactatgcctggcacagagtaaagcctaataaatatttattgcatgcatgatctagaatcacttggctgaggttacagattaagacacgtgtctacttgtccttctttaatatacttaacataccttagcactctgtcattgacacatactgaacaagggcttattcattcatcttttaaaagctaactcactcttttagttttcccacctttgataagggaggataggacctgggaggtcaggccctcggtttactagctcatcctcctctatttctctgagagcataaaatcactggaagtcagccagcatgccccatggcactgtgaggcacaggggagaagcaccaggctcctggattctgaatgcgtggctttgaagcctggcaagagtggccccttccctgagtcccccaccacccctccccttggggcgaggattctgcaggcatgagaagtgcccacccagagtctgtgcctatgccttctagaacacgctctgatacccgataattcccttccaaaatgtcactaagttaattcacagggctctttgtgggcctcatccctggcttcatctcacctgagggcaaactatactgcctgatgcacatcttatagacctgagccttgggcctcaagatagctgtttgcaggtgacagctaggtgttgacccatgcatgctagctccatcactgatgggatgagaggtagctggataagggatggatacaggttccaggggacaggtctccttgggcctacacattctggcacataactccaagggtcttagaattctaatttgaacatggccttccaggttgttagaggatatatccatcaaggaagaaaacagaacatatttcatttaacacttgctggactgttgtataatttctaactatagagacatatggtatatgggcctccaactctactcttgttctgagccccacaaatgcccatttggttctgtcatttctttgcatagacaagctacataacctctctgaacttcagtttcctgagcaggaaaatgggtctatggtaataactacattatcagggctggtgagaaaatgaaataaaataatccatgtcaagggcttgagaagaatgccctctggctgtcgtctcctatgacttcctgtatgatctccaaactgctctctttgcagggtttcaacacggctgctccctcctgcctccttacccacagccaataacctccccattctctccacctagtcaaatcccaccgtcttcaattgtgataatagctggttgattgcacgtttactacgtttcaggcattgtattaagaactttccatgcattaactcagttctgacaccaactcgatgaagcaggcactgtttattattccccaaacacaaagacacagggatctggagactggaagcactggcggctgcaagtggcagggctggcggggtgtgaagccggagaggagtctttctgcagtcaggcctcccaaatcccgggatggaatcaaggagcctttggctgtcccacccctcctcctccaagcccccaaatccaagtctgttatatcccgtcagctctgcgggcctgcctgtgactttcagcccaagggggcgggcacttcgtgtcacgccacgttgtccacatcatcgaccctccctccccttctccccttccttccttccctccctctcttcctcccattgagtgccagttctgtgccaagctttgctgttcaaaatgttacgagtggagaagtcagggaaggatggaattataggtgtttcttcttcatacctttctgtttggctgattttttttcaaatgagcacgcaggcccggttcctcaaacccacttccaatgtggcattgctgggttggtttggtccaaggaaagccctgtctccttaactcccagcccccacgcctcctccgccggcccccaaatccaggccgccctgccccctccggaaaggggagttgggggcgagcgccgaaatctgagtggctctttcaagcctccgttgccatagaaaccggccgcacaggccgatgctgtccattacaccatcctctagcctcgcagccaatggactccgagctccatcgccagaggccccgccccccagctctggggagtccaccaatcagcaggtcccgtgacttagagccctgccctcggcccagggacaccaccaatgcgcttcgaccctgccctccttctcttcggtgtaacaagaagactcgatatttttttttttttttttaggaattctccagatcagaaggaattggcagtaaggcctctgtcagctgcaccctgaataatctttggctgctattttatttaaggagagcaaaactgtttcaattacgcaacaatatataccattctctactaaaacaattttaggaaatgaaaatgtaggcaatgggatgatatagtctgctctatatgaatgtctttcattataggtattttaatttaacttaaaatgatcaaggaactagtcatctttcctttgtatttcaaatgcatacaaaattaaagataccgagttttttgatgcagagttcatgagacattgacttaattagttggtaggcaacttttactgaaccatctaattcctggttcagaacattacaactggaggataaatgaatatttctcttaatccatggaagaaattctgtttttgaggcgggctgcgtaaatggctctgacactctggagtctaaataaaccaaatgtgtttttaaaacccgtttgccattacaaaaaaaaaacttcaattttttagaacacttttagatttacagaaaaattgtgaatataaagttcccgtctaccccagccacccaccctgtttctttcattattattattattattgagacagggtcccgctctttcacccaggctggagtgcagtggcgcgatctcggctcactgcaacctccgcctcccaggctcaggcgatcctcccacctcagcctcccaagtagcagagactacaggggcatgccaccaagcccagctgatttttgcatttttcatagagatgaagtctcgccatgttgctcaggctggtgtttctgctattaacatcacatatggtattgcagacgcatggtatatttgttccaattaataaaccaataatgatacattatttattaattagagttcacagtttattcagatttccttcgtttttacccaacgttctttttctactccatctttttctactccaggatccatccagcatgcctcatcgcactagctgtcgtgtctctctgggctcctcttggctggggcggtttctcacatagcaacatgacatcactgttggtgctgcgtcaggtttctctactggaaagtcagtcttcttttgccccttttcatactgtactctttggaaggaagtcactatgctcgggccacacttaagtgaggagttatgctctatctccttaaggttggaatagctacatagattatttgggatttttctacactgaagatttgtctcatttattcagtaatttatttatatcagtatggattcacagataattatttaatactttaggttataatccaatactatttgattttgttgctcaagttgttccagctttggcttttgggagctctttcggttggctcccgtctccctttgacacacccctatttttgtggggttttctcgttgccgtcaagcacttccttactttctggcactacaagatgcctcaggctcatctttcgtatttcctgccccagtcctcaaatcagccatttcgcaagagctttgattgtttcggagaagggtatttattagaaaccaagaactgggcgctaggtgcactcattgctactagggtgtcatttatttccttcctccctccctccctccctcccttcctttttgagacagagtctcactccatcacccacactggagtgcacactcatggctacagccacgtagccatggtaatgaagccataacctcacgaagcttccagtttacacaattagagggttaattaccaagttgcccagcactctgcagtgtgctgtgtaggcaatgcgggggtaaattatctgaagagaatttaaagacaataaaaactgcagcctagacctcctgggctcaagtgatcctccctccttagcctcctgagtagctaggaccacaggtgtgtgccaccacactcagctaattttaattttcaatttttttttttgtagagataaggtcttgccatgttgcccagactgatacaactcccggcctcaagccatcctcctgccttggcctcccaaagtgttgggattacaggcgtgagccaccacacctggccttggggtatcatttcttttaagccttctcaactgacagaacaaagaaatatatctgtatataccaatgtgtatatatatacacacatatctatatttccatttgtaaccatctgtatatatattaagctaaacatgagttcctgtttatatttaccacttgaatccagggatcatttggcttgcttcctgcttgcttatctctaaattcccactccaataacgggaaacctggttcccatcatccacatccaccatccatttacttaattgttcaagtccagtatacatgtgtaggattatcaaaattgttaacccatacccctgtgggaaactttatcaagtagagtacattcttctgaacactttcttttgcctttagtgttccagcagactccacttgtttcttttttctttttcttttttttttttttttgagacagagcctcactctgttgcccaggttggagtgctggagtgcagcggggccatcacagctcacagcagccttgacttcccagtcttaagtgatcctcctgcctcagcctcccaagtagctgggactacaggcatgcgccactacacccatctaattttttaaaatttttgtagagatgggatctcactatgttgcctaggcttgtctccaactcctgggctccagtgatcctcccgcctcagcctcccaaagtcctgggattaaaggcatgagccaccacgcctggcccactcatttctaaagttacttaggtcagcacgttttcctctatcctcttcatgaggtcatttcacacatttgtaatacggtgaagatgtttgtcatattctgcatgacattttggaattatctaaatgtcctaagtgatttttttaactttgcatgcattaaggttcactttttgtgctattaagtttaatggatatcaaccaatgcacagtcatatacccacatttcttcaccctaaaaaaccccctgtgctcacttattgaaccctctccccgccaaacactggcaaccacacatccgtttactgtatctatggttttgcctttttgtgccattattaaaaaaaagaaagacgcacaatatttttgttgttgctcttgtcacagctgccacccattgaatccttactatgtcccaggtccagaattacactgtcccattttgaagatgaggaaacagatgcaaatgagttgaagtactccctagagactcataacaataagcaaagtttgacttctatgattaacttctgagtcacctctgggaatatttgtaatatgtctaatagccacacttcttttgtttgttttgatacaggggtcttgctgttgcctaggctggagtacagtggctactcacaggtgcaatcatagggcactacagccttgaactcctgggctcaagcaatcctcctgcctcaacctcaaaagtggctgggactacaatgtgtgccactgtgcccagctatattagccacatttcaagtactcaatagccgctgtgcagtttatactattatattggtttctgagttttgtttttgagactgcgtcttgctctgtcaccaggctggagtgcaatggcacaatctcggctcactgcaacctccaccacctgggttcaagcgattctcctgcctcagcctcccaaatagctgagactacaggtacgtatcaccaagaccagctaacttttgtatttttagtagagacatggtttcaccatgttggccaggatggtctcgatctcttgacctcgtgatctgcccgcctcggcctcccaaagtgttgggattacaggtgtgagccaccgtgcctagctatattgttttttaaaagatctcttattatttagtgaaaagaaaggacctgtagtctcagttactcaggaggctgaggtgggaagatcatttgagccccagagtttgaggtagcagtgagctatgatgatgccactgcactccagcctgggcaacagagggagatgccatctcacacacatacaaaagaaaagagaccttgtaatgcacacactatcataatctctgatttttctttttttttttttttttttgagacactgtcttgctctgttgcccaggctggagtgcagtggggtgatcactgctcactgcagcctcaacctcctgggctcaagtgatcctcccacctcagcctccccagtggttgggaccacaaatgtgcaccaccacaactggtaaattttttatttattgtagagatgtgggtctcaatattttgcccaggctggtctcaaactcctaggctcaagctagcctcccaaagtgctgggattataggtatgagccactggctttttttgtttgtttgtttgtttttgtttttgatatggagttttgctcttgttgcccaggctggagtgcaatggcgctatcttggctcactgcaacctctgcctcccaggttcaagtaattctcctccctcagccttctgagtagctgggattacaggcatgcgccaacacctccagttaattttgtatttttagtagagacggggtttctccatgttggtcagactggtctcaaactcctgaccgcaggtgatctgcctgcctcagcctccaaaagtgctgggattacaggtgcgagccactgcccctggcctgacttttttaaaatcaggaaatttagatgaatcaaaaaagaaattaccttgtccctattgttctcttctcattatgaatgtctttgaggaccatgccagttggcaaataggtattttggagctagacacagttagggtgagtggagtaacacgacagtacctacaacagccacacccacacctgagttggcttcatcctgccttcaggtatcattaagaataggtattattattattattattattattattattttgagaccgagtctcactctgtcgcccaggctggagtgcagtggcacaatctccgctcattgcaacctctgcctcccaggttcaagcgattctcctgcctcagccttctgggactacaggcccgtgccaccacgcccggctaattttttgtatttttagtagagatgggtttcatcgtgttagccaggatggtttccatctcctgacctcatgatcctcctgcctcagccttccaaagtgctgggattacagatgtgagccaccacacctggccatatatatatttttttctttgagacagttccactctgtcacccaggctggagtgcagtggtgtgatcatggctcactgcagcctggaactcccaggctcaagagatcctcctgactcagtctcccaagtaactaggactataggcacacaccaccaggcccagttaatttttctatttttagagacggggtctcactatgttgcccagactcgtctcgaactcctgggctcaagcaatccttccaacctctacttcccaaagtgttgggattgtaggcatgagacaccacatctggcctataatggaatattatttggcaataaaaaggaagttctgatacatgctacaacatagatgaacctagaaatcatgatgctaagtgaaagaagccaggcacaaaaggccacatgttgtatgattctctttacatgaactgtccagaagagacaaatccatggatacagaagcagattaatggtggcctagggctggggattagagggaaggcagagcagatgggagagtgactgctaatgagtactgatgctaatggtttcttttggggatgatgaaaatagtctaaaatccattgtggcaacagttacacaactctgtgaatgcactgaaagccactgaattgtaaactataaatgactgaatagtgtggtatgtgaattacatctcaacaaagctgtttttttttttttttaatgttctggaagaatcaggatagacattacctcaggtgaaggaaggcaggagatgggatggtaaaggaattcattggggaaaacaggttatcaatgttccagttcttgtgtcagattgctgactccacagatttttattatgttatgtaaaaataaatacacacagggccaggcatggtggctcacacctgtatcccagcactttgggaggctgtggtgggaaaatcgcttgagcccaggagttcaagaccagcctaggaaacatagtgagaacctgcctctacaaaaaaaatttttcgaaattagccagccatggtggcatgcatctgtagtcctaactacttgggaggctgaggcaggaggatcacttgggcccagaagttccaggatgcagtgagctatgatcgcaccactgtactccagcccaggcaacagagcaagaccaggtctctaaaaaaaacccacacaagcataaagtgagggaatcacaggcaacaatgagaatgtgtcgcagatgaagcgattctgtatacctgagacagagggagatgaacgggaaacggcagagagtggtcaggacagtcctctctggggagcccgtttgagccgaagctaggatgagtagatgctccagcccatgtggggatgggggtgaaaagagttccagacaaaggagacagcatgaatgagggccctgaggtaggcccaagcctgttgtgtttgggggacagccagtttaaatgtctgttctgttatattgtggagtctctgtgtatgaatttttcctaaagaaataacagacaggccgggtgcagtggctcacgcctgtcatcccagcacttcgggaggctgaggcaggcagatcatgaggtcaggagatcgagaccatcctggccaacatggtgaaaccccatctctattaaaaatacaggtcgggcacggtggctcacgcctgtaatcccagcactttgggaggccaaggcaggcagatcacaaggtgaggagatcgagaccatcctggctaacacggtgaaaacccagctctactaaaaatacaaaaaaaaaaaaattagccgggcatggtggcgggcgcctgtagtcccagctactcgggaggctgagacaggagaatggtgtgaacccgggaggcagagcttgcagtgagccgacatcaagccactgcactccagcctgggtgacaaagcgagaatccgtctcaaaaaaaaataaaaattagctgggtgtggtagcgcacacttgtaatcccagctactcaggaggctgaggaaagagaatcgcttgaacccaggaggtggagattacagtgagccaagattgcgccactgcactccagcctggcgacagagcgagactccatctctaaataaataagtggccaaaaacatacatacaaaggtgttcactgccatattgtttataatagcaaaaaggggtaaaacaatcaaaatgtctttcaagaaggaactgattcactttgggaggccgaggtgggcagatcacctgaggtcaggagttcgagaccagcctgaccaacatggtgaaaccccatctctaataagaacacaaaattagccaggcgtggtgatgcacgcctgtaattccagctacttggaaggctgaggcagcagagtcatttgaacccaggaggcagagtttgcagtaatccgagatcacgccattgcactccagcccaggcaaaaagagtgaaactccgtctctaaaaaaaaaagaactgattaaatgaattacaatatactcggcagacctggacgagaacctacgcactacatggaaagagaaaagagatgtgaaaaaagcaggttactagaaattacatatagtaacattccacttgtgtaaaaaaaactatgtgtgcatgtgattataagcatttaagtttctggatggccaggtgaagtggctcatgcctgtaatcccagcactttgggaggccaaggtgggcagaccgcttaagcccaggaatttgagaccagctcgggcaacgtggcaaaactcagtctctataaaaaatacaaaaaattagccctgtgtggtggtacgcgtctgtagtcccagctacctgggacactgacgtgggaagatcacttgagcccaagaggttgaggctgcagtgagctgtgattgcgccactgcaccccatcctgggtgacagggagagaccttgtcgaaaaaaaaaaaaggccgggcacggtggctcacgcttataatcccagcactttaggaggccaaggcgggcagatcacaaggtcaggagttccagaccagcctggccgatatggcgaaaccccgtctctattaaaaatacaaaaattagtcgggcgcagtggtgggcggctgtagtcccagctacttgggaggctgaggcaggagaatcgcttgaacgtgggaggcagaggttgcggtgagccaggatcgcgtcactgcactccagcctgggcaacagagtgagactccgtcccgtctcaaaaaaaaaaaattctggaaaattacattaaaatttaaaatttactcattataatgccatttttctagattacaggagacgttcacttttcgccttatataattcagtataaggccgggcgcagtggctcatgcctgtaatcccaaaactttgggaggccgaggcgggcggatcacttgaggtcaggaattcgaggccagcctgaccaacatggcgaaactccgtctctactaaaaatacaaaaattagccaggcgtggtggcacgcacctgtagttccagctactcaggaggctgaggcaggagaatcgcttgaacctgggaggaggaagttgcagtgagctgagatcacgccactgcactccagcctggtgacagagcgagactccacacacacacacacacacacacacacacacacacaaacacaaacaccatatatatacatatataacttttgtaataataaaaaacatacttctacttaaagagaatatcaataagccctaaagtttttcatagtgaaagcccttcaaaattgcttgacaaataaattctaagtatactaactatgggaaaaatgtatgcttgcgaagactttgttagacacattttcttaaatgctgaagctataatttaaaaatgaagatttcaggagacaaaataaagtcagctggataaaaaatgtgcagagagaaaaaatataccaaaatgttaagagtgagtgtctcggccgggcgcagtggctcatgcctgtaatcccggcactttgggaggctgatgcgggcggatcacggggtcaagagtttgagatcagccggccaacatagtgaaaccccgtctctactaaaaatacaaaaattagccgggcatggtgatgcatgcctgtagtcccagccacttgggaggcttagggaggagaatcacttgaacccgggaggcagaggttgtggtgagctgagatcgtgccactgcccttcagcctgggcaacagagcaggactctgtctcaaaaaaaaaaaaagagtgggtgtctcttggcactgagacaatgaatcccaacaaattcccaacaaatgatattttttccttaaatttcagaatttttgaagttttacacaatgaatattttgtgatctgaaaattttttcttcccctcctcttccaattcaacagctgaataataatcttgtgttcattgtctgctactgcttaagacattctttccagacttagaggcttaacaaagcaaacagctaccatctcacagtttctgtgggtcatgaatccacgcagagtttagttgcatggttctggctcagggtcattcacgaggttgcagttgagatgctggtcagggctgcagtcatctgaagacttgactggggctggaggatctgattccaggatggatcgatcactcagatggctgttggaagtaggtctcagttccttgttggtgttggcaggaggcttcagtttctcaccacgtagagctttccacagggctgcttgagtgccctcgcatgacagctgacttctcccagaataaatgatacaaaataagacagccaggaggaaaacatagagctttctatgtccaatcttagatatcacaaaccatcacttctgccatattctattagttagaggcaagttcacacttaactgggaaggggaggaggaattaggctcttccttttgaaggaaggaacattaaagaatttgtgaagggccgggcgcagtggctcatgcctgtaatcccagcactttgggaggctgaggggggcggatcatgaggtcaggagattgagaccatcctggctaaaacggtgaaaccctgtctctactaaaaaaatacaacaaaaattagcagggcgtggtggcaggcgcctgtagtcccagctactggggaggctgaggcaggagaatggcgtgaacccgggaggcggagcttgcagtgagccgagatggcgccaccgcactccagcctgggtgacagagcaagactccatctcaaaaagaaaaaaaaaaaaagaatttgtgaacatgtttttgaaacacaagaaaatttccagctgatctttccccccaaatttccctcctccaatccaactacaacacatgaaactccttaatcttgctgaagcgtacctctgatcatgtcatcctgcaataaaaaaactgtccctggctccccacaacccagggaactccataacttggcttctgaggaccaactaccgtattgcccttcagctccagctcaacataaacgcatcgtattcctcatgtacactcccccatctctggtcttggcacctatccatgccctctcaatacctcgtcccagtctccttcccatctccagtcccttgcacttgctgtttcctctgcctggaatgttttacatggatggttcttcgtcatcttgagatctaaactctcccccatctctatcatcccccgtcccagtcactcactctctcattaccttgttttcttttcattgtcgtttgagacagggtctcactctgtcccacaggctggggtgcagtggtacgatcacagctcactgcagcctcaacttcccgggctcaaacgatcttcctgcctcagcctcccaagtagctaggactaaaggcacaggccatcacacctggctgttttgtattttttgtagagacaggcttttgccatgttgcctaggctggtcttgaacttctaggctcaagcatctgcccacctcagcctctcaaagcgctgggatttcagatgtgagccaccttgcccagcccctccctcccttctttccatcacccagtctggggtgcagtggcaccatcatagctcactacagcctcaaaatctctggcttaagcgttttcccacctcagcctccccagaagctgagatgacaggtgcttgctaccatgcccggctaatttttgaatttttgtggaggtgggatttctctatgttacccaggctggtctgaaactcctgggctcaagcgattctcccgccttggcatcccaaagtgcagggattacaggcgtgaaccaccacacccagcccagctttattttctttatagcagtcacaactatctgaaattatcttatttgtttacctgctcttttctgttgccctcacttgctccttaagaacagggacctctgtcttggtcactgctgtaacccagtagccccagttccaagttcactgcctggtgcacagtaggtggccaataaattgttgaattaaatgtcctctcttccagggagttgttttagaaagaatcacacactgcataaatgtctgttgaggaagaaaatgaaaaaaacaaaagtgaagacattatcttctcggctgaacttcccacaccatcttctctgtcattaataagtcctggtgtctacactggggaaggcagtccaaggttcttccagggcctaggttcagccagactttaaccatctctagctcctcagagtccgtcaaagggcctaaggaatggtaagtattaataatgtttgtttatgtatttatttatttatttattttgagataaagtctctgtctcccaggccggagtgcagaggtacaatcattacaacttccacctttccggctcaagcaatcctcctgcctcagcctgccaagtagctaggactacaggcaggcaccaccctgcccagctaatttttgtacttttttttgtagagtaagggtttcaccatgttgcccaggctggtcttgaactcctggccttaagtgatctgcctgcctcagcctcccaaagtgctaagactacagctgtgaaccactgtgcagggtcaaatgtttattaatggatgcatgcatggatggaagaaggaaaggaggcaggtgtgaataatgaatgcagcattttcactgctgagaataaagagtgaaatcctggtccaaatcagtttggcagtgagtaaggttaggaactattcacatacattggaataataatagcagcagcagctacagggtcagagacagatctttgagaggccataagcattgaaaagattgtggtacctatcacacaccgtctaaaataaaacaaatattttatttatgggaaaagtgttaaggtgttgataattccaagaaagcttttatttgtcctacaatcattactttgataccttttctgaaatcctagagctgtccccactctgcccatttttttttctcattatggtgatgtctctgggttgctggtgacctgcgtaactattgggaaatctagtttctcaaaacttttagtttttttttagacagggtctcactctgtcactcaggctggagtgcagcggctcactgcaacatccgcctcctaggttcaagcgattctcatacctcagtctcctgagtagctgggattacaggtacgcgtcaccaagcctgactcattattttgtacttttagtagagacaaggtttcaccatatcggccaggcggatctcgaacttctgacctcaaatgatccgcccgccttggcttcccaaagtgctgggattacaggtgtgagccaccgcgtcccgtctatcataagttttattgaacattgcctaggtatcaggatgtgtttacatgcattatctcatttaatctgtaaaaccaccatgtgagggagaaactgaattatccccattttcaggataaggaaaaggagggactgggaatgtgaactcaggaagtgtgactccatcgggtagactgctcaggctgcagatgtaaaggttttacacgtaggcttttccagatctcagcttctgaaaggcggagggaccgtttggacgggagcagggcctcctcttccaagcaccctgtgcctttaagagtcgccccctccctccagggatgctccaatttctttctccccaccacccccaccccgccccccgcgccgcggagccgcacctcggtccttcctccccgccccacaccctcaagctcggctcttggccttcgctcgtccagaagtgggtgagctgtaccgccagaggcgcattctcctagccccaaaccatgcccgctacgccccagcggaatgccaccttaaagaccctaatccgggcacctcccagctcctgcttcccaagggcgaggcctcagcgccccctcccatcgcccatgctcacgacgccgtgaaggtgacctcccccaggggcggcacacgcccagtggtgcccgaactggctcacacgtggtgagccgggagcgcgcggcccctccccgccacgcgcctcgtgccggccacccggccacgcccccaggactggctccgccccgtgcccctgcacgcttctccaggcttgggtggggcgacgcgcccaagtcgggcaccgggcaggctacggggtggggtaggacctgggaatggcgcacccacgcatcctcgaatgtcgcctgcggtttgtgaaaagcgggaagtccgcccagctcaggacctttggctggcaggcgaggtgccccgcggcccttggtgctgagcaggggagagacagctgggaccgcgagcctgggaatcgaatcctagtctgcgtgtcctcggtgcttcctatttggaaactgggcatcatattatcatattcccttctccctccggattcttatggagcttcgaacgagattaaatatacatatatatgagaaagggatttgttcactaggtccaaaagcatttgctggtcccatatgtggtcggaccctgtgtgtagtaggcggggggcaacatctacgacaacctgagttcgtccccttaagaagctttcctgagtcttgggccccccaaattctcttctgggatggtccgaaaagacgtccctgaaagaggaaagggcggaaatcctacctgacggcaggtgtctcggaatgagctaaaatttaaaaggcaacgcggggcagggacaagcgtccagcgtcagatggaagcaggctcgcgtcccctacccttcctccaacccctaacctaagaaaagaaaccgatctcgccggtctcccccaatcctagccgcgagaccgcccagccccgcagcccgagccccgccccgctccggcggccagcgattgggagatgcaaataccggcttctctgcccagcaacgggtgacgcggcgcccgagcgcgaggcggggcccggccgcagcccaagcgggcacctcggtgtttacacggggcggccccgcgcgcgccgcagcggcccgcagacggcgagggggaggggtggtgcgcgcgccggcggggccgcgcggggagaaagacactgaaaggcgtcggcggccgggcggggagcggcgcgcgcgggccgcggcggagccagaggctgcaggaagagcccgcgggggcccggagggtgcgattcctcggcccccgcaaaacaatgtgtgttgtgagccaggacgcaacttgccggaggcggcgggggcgcgccgagcccgcctgagaccgcgctgaccttctccccccgccgtccgttgggcccgagcgcccagctcctcgctccccagttcgcgggggccgggccgagccgcggggcggggccgcccctccgtcgccgctgcctcctcccccacccccagccgcggaggatgcggacggcccccggcggcgtctagcggccccgggcccaggcgcgatggtgcagcagcggggcgcgagggccaagcgggacggcgggccgccgcccccgggacccgggccggccgaggagggggcgcgcgagcccggctggtgcaagaccccgagcggccacatcaagaggccgatgaacgcattcatggtgtggtcgcagcacgaacggcggaagatcatggaccagtggcccgacatgcacaacgccgagatctccaagcgcctgggccgccgctggcagctgctgcaggactcggagaagatcccgttcgtgcgggaggcggagcggctgcggctcaagcacatggcggattacccggactacaagtaccggccgcgcaaaaagagcaagggggcgcccgccaaggcgcggccccgcccccccggtggtagcggtggcggcagccggctcaagcccgggccgcagctgcctggccgcgggggccgccgagcagcgggagggcctttggggggcggggcggcggcgcccgaggacgacgatgaagacgacgacgaggagctgctggaagtgcgcctggtcgagaccccggggcgggagctgtggaggatggtcccggcgggacgggccgctcggggacaagcggagcgcgcccaagggccgtcgggcgagggggcggccgccgccgccgccgcctccccgacaccgtcggaggacgaggagccggaggaagaggaggaggaggcggcagcggctgaggaaggtgaagaggagacggtggcgtcgggggaggagtcgctgggctttctgtccaggctgccccctggcccggccggcctggactgcagcgccctggatcgcgacccggacctgcagcctccctcgggcacgtcgcacttcgagttcccggactactgcacccccgaggttaccgagatgatcgcgggggactggcgcccgtctagcatcgcagacctggttttcacctactgagcccaccgtcagcggggcgcgcacgcccccaaaccagctgtttacatacaggaatcaggtattggggcccctcggaggccgaggctggcaccccatctcccgcgcagcctgccccctcctggacgtgcccatcccccctcagatccagacatgcccctcccccgcagacacaccccaaggcagcccaacccccaccccttccccgacacccaagcccctccccacgtcgccccctcctgcacagccaccagcagccagccccctccgatacacctcccgtcctctcctacagacctgcacccctccccccttttgcacacgcccctcctcgtggccggaggacccgccccctcctttgctccggaatctctcctccctcgcccggcccgccttctctgggttaggggggcgatgcggccgggtggcaacgcacgcgcctcctgcgcccctcccttccctggggggaggggcgcaccccttttatccccggagcgctagggcccgcccctccgctggggcccacccccttcgtgcgcatgcttaatgcttctggggaggagggggctggtcccagcggagccgcactcttcgcccgctccgggcaaaagcgggggcgagtgtagagcgatcctgggaaatcctttgatccgggagccctaggtttcctctccagccaacggggcgtcgctgccttaatgggaggagcactcggaagggttggtttgggcctgaaactctcccaagtggcatagccccttttccggtatggggtctcctacacccacgcgcaccacctctccggtcgcgtggctgcctctacagcctacctatacgtccctttttccccccaactgggaattgagaggtaaggtctttctctggaaatccagcagtagaggaagggaccacccaagaaaactaaaaaccaaggcaccttaccagtctgtctggggacaggatccctgctgcaccttccccaccccctcctgggaagtgccccctcacctcagggcacccgcaacctgggctcctccctgagcgcaccggcccttcctgtcacccaggtccaccctcagtactcaagctgcagtatacagcgggaaaaactgaggcactttggtgctaggggtttgggactgaggcgtggagagcagatgtgatggcaggaagactctcgcttttaaacatctggtttgggagagaccatcgacttggccagtgagactgagaatggattccgagtagtgatgggccgtttgcacctcggtttttccacgtgagaaatggggagaacgctgctgttaggaggaagttgtgtccagttcagggtgccctcgggagccctgtccctgttgctgtggcccctctcacgccgccatctctctgccccgccccgcccctccggcctccccacaccccccttgccctcactacctgtatctcaccggcgtgtgttcaccctcccgggtggctcacacactctcattcacacacacaaatctcaggaacaaacggtcccagagtcctccggacccctgcccagggtctctgcaggtctctgccccacgcgttcccgtcgctgacaaagccaccagctgcctcctttaagcttggtgctccggctctgggcctttcttgcgctctattttttttttttttttttttaagaaaaacaacaacaacaaaaaaagacaatgaaaaaaaaaacgtcatgtgagtgaagagatgtcactgtctgtggtcttggagaactagtctcgtagctgaggggtggggtccctctgtctggggcactggcacccacagcaggactccgccagtctgatgccaggactgaataaagtgtatttgccccgaccttgccctgtggttctgcatgtctgtgctcttcctcaaccctccctaaacagtttgccagattcaagtccgtgtgatttgggcccgagctgggtgtcccagggcaagccaccttgcctgtctaggcctctatgtcaggactccctggccttcatgaagaatagcaaactcatccctgtagggaccaggcaggtaacatagacgagtgactctgggtggacagtggtgtcatgacccacttcaaggggcctacctcctgccagttgtgaccctgtgggaatgcagtccacagtggccaggtggccagatttttcaagaaaagctggatggatgtttctgagtcatcttaatttcaaaatgagactcatattttaaaatttctgtgggccaaatgaaacaagtatgcaggcaggtctggtccgagggggctggcttggccatgcctttctgtgcctttaatgaggactaagaagcaagattgggccacactgtctggactcaaagcccagctccaccactgagcacccgtgtgactctttccatatgtataacgtggggataataataatagctgcttcacaggatgaaatgaagtttgaggtgagaagcattcaccatggtgcccatcgtgttactccattgtcagaggaggaaacggggtcaggcaggaaagcaacttaaaggagggcctgcaagcagccagggtcagagacagggcttggttctgcttcctggtgaagcatggcttcggggtgctgcctctccctccctgtttgaatctgcagattgtgttaggcccccagctgagggcctggagtggtgggattggtcccagtgcctggcgcacattggcctgcagagtagattaactgaatgaccaaagagcaacagaagtctagtgattcttgtctttgaggttctgactggtgttttacaactgagtccaaggcttttccctcctttgtccctctgacacccctccccctaattctcatctgtcagatccagtgtattcctaagctgggacaaagcctctgttttcccagtaggagccagggctgagtgtggaaattacagtgactgcttcttctcagcttctctggttgaaagcaagctggcgaagtaagaggaggtagagttgagaaggtgtggaagatagggacagctgcccccagaactcccttcaagggaggacttccccagctatgggaagtgccatcagggtggccgcagctgcagagagccacttcacctgagaccacgcccttcctggggcagcctgtatctggtgtctgagtgaggcatggtataaacacctggtcatttcaatccaacatgggacggacactgacagacagtactcccagcaggcccaggccagccagggcttcgtcaggcctgcagcacaatttgacttcctatgcccaggcctgcttcctcttcttcctcttcttttcacaggtgcttattcctaataaacatcttgcaacccaaactcagtctcattgtctgtttctagagaaacccagtctacaacagagggttcaagagactggacaaagggaattgggtcagtggcccagcaactgcagctaggccggtcggatgtatcctaatgtcaagagtctgttcaccgatgccatcagcaccaaactaggggctgcacactttcctagtctgcacaccagtcacgtcaattagagactccagcctcagcccgaaggccttccagggccccctgctgatgccattctcactgccagtccgtcccctggtaaaagcaggtgggagggaggtcgtcatctgagtttgtcttacagaatagcctggaatggggtgcacggtaaaatgcctgaccggagataatgctagagctgtggaaccttgggcaagcctcttcccctttgtgggctgtactgggagtcggtaataggactagaagagggaccatctcattttggttccttccatttcagatgctgacctgaaaggtcggggagacagctccttatggggtctctggggccacctagtggctaagaggagtagaaccaaggttctgtgcagttgggaggtgggagtcggggtgtgtcccaggccaaggaactgagtcccactcgagtctcactccattcatgcattgactcattgctgggtcatgccccttgcctgggtggtgtgagccaccctgcttccaaggctttcaaaacaccatacgctgatgtattgtttctcatctattgctgcgtaacaaattgccacaagcttagcagtgtaaaacaacatgcatttgttatttcagtctccatgcatcaggagtccagcatgccttagctgggtctctgctcaggatctcacaaggcagcagctggggtgctggtggcccgcattccttcttggagctcagcagccttttccaagctctcacggtagtgggcagaattcagttctttgtgcttataggacagagatccctgttctattgctggctgtcagttagtaccactcttgattactacaagctgctcagtttcttgccacatggcccccacagggcctccccagccttctcacaatattgcaacttattttgtcaaggccagaggagaatttttctgctgcttggagtcacttggctcagggaaggtttaagctctcttttaaaagcctctcctggctgggcatggtgtgttcatgcctgtaatcccagcactttgggaggccaaggtgggtggatcacctgaggtcagcagttcgagaccagcctggccaaatggtgaaaccccttctctactaaaaatacaaaaattagcctggcgtggtggcagtcgcctgtaatcccagctacttgggaggctgaggcaggagaatcactcgaacctgggaggcggaggttgcagtgagccaagaccaagccactgcacttcagcctgggcgacagagcaagactctgtctcaaaaaaaaaaaaagaaaaaaaaggaaaaagagagagagaaaaaaaaagccttccctaattaggtcagactcacccaggaaaatctcctttttgattaggcatcaactaatgtgggattttatatctgcaaaaaatcccttcacctttgcagtatattgtagccttataagagtgacagctgtcatactagatttgcccacactcaaaagggaggaggctgtctagggcagctacaccagagactgggaatcttgggggccatcttagaattctgcttatcacacacctgtaatcccagcacttcgggaggccaaggtgggaggatttcttgagtccaggagttcaagaccaacctggccaacatagcaagacctaatctctagtaaagttttttttaaaaaaattagccaggcacggtggtacacacctgtagtctcagctacttgggaagctgaagtatcatagctgagaattctcaggtctacatctccatcccagacatgactagactagctgccttcttgtcatctccactgatatatctaattggcacctcaaactggacatgccaaaaaatgaactgtttccacagtgctcccaagcctgcttccacagaccacatctgcacagctgatgtgaaatgaaaggctaaagcctctcagttatccttgatgcctcttttcctcccagcgccatctcccttataccctgttggctctaccttcaaaatatgccctgtgtcttgtcacttctcacatcttccatggcctctgggtccaggatataagggcatacgaagggctccttgcgttttcctttgccccactcatagtcttattgtccacacagcagccggagtgatctggttaaactgtaaatcccagcacaccctgccactgttcaaaattctccaaagactctcattcagtagaagccagagtcctcagcatggcctgcaaagccccataagaagtagcctgtggctcagcctcggcttcatcttctactttttctgtttctcacatgcccagtcacactggtcttgctgttcctcaaaagtgccaatcacacttccgcctgaaggcttttgcacatgcttttccctctgcttaagatacccttcctccggctgggcgaggtggctcacgcttctaatcctagcactttgggaggtccaggtgggtggatcacctgaagtcaggagttcgagaccagcctggccaacatggcgaaaccccttctctactaaaaatacaaaattagctgggcgtggtgacacatgcctgcagtcccagttactcaggaggctgagacaggagaatcacttgaatccaggaagcagaggctgcagtgagctgagatcgcatcactgcactccagcctgggcaagacaaagcgagacttcacctcaaaaaacaaacaaaaaaatacccttcctccagatagccacatgtcttacttccttcaggtctcagctcccagggcgccctagagtaggcacagggagtacctcacagtgtcctccctgaccatccatataaagtaacatcctccataaactatcctgttactttgctttatttttctgaatagcatttatcactatctggcatttatcacctgtagtttttactttttgtctctctctctctaatttgtatgtaagcttcataaggaaggaatgactctggactggactccatgcctcagcacattcacccacccattcaacaaacattcttaagggtctaggctgggcatggtggctcatgcctgtaatcccagcactatgggaggccgaggtgggaggatcacttgaagccaggagtttgagaccagcctgggcaaggaaacaagaccctgcctctaaaaaatacaatttaaaaaagtatccaggcacagtggcgtgagcctatagtcccagctactcgggaggctgagctgggaagatctcttgtgcccaggagttcaaggctgcagtgagccatggtcatgccactacactccagcctgggtgacagagttagaccctgcctgtaaaaaaaaaaaggtggggggcagggtggggaaggtttgccttgaccaggccgcgtgctaggtgccgggcatacaaaagtgaaaaacgtgatttgtcctcagtgagctcacaggtctgaggagacacataaacccaggaatggaaatgctttgctggcgatggacagtgagtctgggagaacattgaggagatgtttaacccagacaatggagtggggtgtggtcaggtcattccctggaggaggtgatgtttaagctgtggcatgaaacctcagtaggatgtgatgaccttagaacatggctacacgttctttgacattcctcctttaaattaccttccctttgaatctgggctgggccttcatgatccatttgtaaccaacaggacacagcagacatggtgctgcaggatttccaaggctaagtcacgctgaaccgccatgttgaaaggccaacagccaagactgccatgtggagaagcagcccgggccacgtgggaagaccatgtgtaggtagctgctccagttgacagctgagcccaggcaccagacttatgagttgagaagcttccaggggattccagcccctcataattcaactcactcccagctgttggagggccttcccagcagaggcccagccatcacagagcagagacaagccatcccttctatatcctgtctgaattcctgacccagagtccacgaacataatgagatggcagttgtccacactattaggttttggggcagtttgttatgaaggaataactggaacaataggataaggaagagtgaggtgaaggaaaggactttacagatgccagcaacagtacatgggaagacctggtaagagtggctgacacagaagctaaccagcttgcggggaaggtgtggagagaggagggtgacaggcaagagtgagaaggaccttgaaggtatttggactttatcccgagtcttcacactgcagcccaaggggtcaaggagtctttttttttgtatggtaaacatggggtcttgctatgttgcccaggctggtcacaaactcctggcctccagagatcctcctgccttggcctcctaaagtgctgaaattacaggtgtgagacactgtgcccagcctccaaggggtcttctcttttttttgagaccgcgtctcgctctattgcccaggctggagtgcaatggcgcaatctcagctcactgcaatctccgcctcctaggttcaagcgattctcctgcctcagcctcctgagtagctgggactacaggcatatgccaccacacctggataatttttgtatttttagtagagacagggttttaccatgttggtcaggctggtcttgaactccttacctcatatgatctgcccacctcatcctcccaaagtgctgggattacaggcgtgagccaccatgcccagccggggtcctttgaaaacacaaacctgaccactgctgtaaacctttcgatggccccttactaccctcaggataaactcttgaaattcaaggcattttgcagttgactccctcactcttttatagatttatcttcggtcactttatcctcagctacgccaggccactctccagtgacaatgcttcccgcctcacccatgctatttatctttgctcatgtggaggaattagtgggactttgggctaatcaccttgcctttcgaggcctcagtttccccatctgtatgattaggtggttggactagaagtttttgttttgttttgtttttgtttttgtttttttgagaccgagtttcactctgtcgcccaggctggagtgcagtgctgtgatctcggctcactgcaacctctgcctcccgggttcaagtgatttttctgcctcagcctcccaagtgactgggattacaggcatgcaccaccaggcccaggtaatttttttgcatttttagtagaaacagggtttcaccatgttggccaggctggtcttgaactcctgacctcaagtgatccacctgcctcggcctctcaaagtgctgggattacaggtgtgagccacgacacccagccttagatgtctcttaagagcatatctagcctggcattctaggagtctatgaaaaggagggagaaaggtgtctgtagccaaacctgcctgtctggcttcttctaggttgcctagcaatggatgccaaccctctcccccatccttgggggtttcttagcaacccagtttctcaccctctgctgttttcagggtttccttttaactaaatgtcaagttttgctctttctcctccagaaaacctgaggccaagggtctctgtgtagagctggatacaacccagaatacacagagacctgggtttgaggtcagtggaggatttgctgtgtgacttggaggtctttgacctctctggctttcatttcagactgtgattccctgtcatatgctcctcagagttcttcttcttttcttcttcttcttctttcctcttcttcttcttcttcttcttcttcttcttcttcttcttcttcttcttcttcttcttcttcttctcttcttctttcttcttcttcttctttcttttcttcttcttcctcttcctcttcttcttcttcttcttctcctcctcctcctcctcctcctcctcctccttctccttccttctttcttcttcttcttcttcttttgttttttgagacctagtctcactctgtcgcccaggctggagtgcagtggggcgatcccggctcactgcaacctccgcctccctggtacaagcagttctcctgcctcagcctcccaagtagctgggattacaggtgcacgccaccatgcccagctaattttgtatttttagtagacacagggtttcactatgttagccaggctgatctcgaactcccaaactttgggattacaagcatgagccactgtgcccagcctgttcttttctattttttgagatggagtctcactctgtcacttaggctggagtacagtggcacaatctcagctcactgcaacatccacctcccaagttcaaacgatttttctgcctcagccaccaaagtaagctgggattataggtgaacaccaccacaccgggctaattttttgtattatttggtagagacgggttttcaccgtgttacccaggctggtctcagactcctgacctcaagtgatccgccagcatcagcctcccaaagtgctgggattacaggcatgagccactgtgcccagccctctgtattgttctgattttagtatatgtgtgctgaaatgagcacttccctcttctcttgtatgcgtttggtttgactaccaaatttattcacttttgcaataaaccgtcactgagcacctactatgttccaggcactgtcttaaggactggggattcgtcagtgaataaagcagacatagtcccttccctcacagagcttatactctagtagatggaaacgtataatgaataaacagataagtgcacataatgatatcatgcagtgaaggggacaaagtgtaaggaagggctactattttagatgaggaggttgtatcagtcaagatgggctagggaagtcagagatggttgggaagaaaaagcctggcttccccctttctccctccaacttcctgtgggtgcctcaccttgggtgacctcagctagaggccagctgacaaaggaggctgagtagcttccaggggtcagctctgcaaagcaggaaagagcaaggaatccactggaagcaagaaggcccaaaagtaccttgggaggtacgccgctttttcagctcactcactgcctgtaaactgtcagggaccctaggatcattaaaaaatattttgagggccgggcgtggtggctcacgcctgtaatcccagcactttgggaggctgaggtgggtggatcacttgaggtcgggagatcgagaccagcctgaccaacatggagaaaccccatctctactaaaaatacaaaattagccaggcgtggtggtgtgtgcctgtaatcccagctactcgggaggctgaggcaggagaatcacttgaacccaggagacagaggttgcagtgagctgagatcacaccattgcactccaccctgggcaacaggagcgaaactctgtctctctctctctctctctctctatctatatatatatagatagagagagagagagagagtagtaaaatacagatagcataacatttaccatcttaaccatctttaggtgtacaactcactggatattaagtatagtcacattgttgtgcaaccatcaccatcatccatcttgagaactcttcatcgtgcaaaactgaagttctggatccactatgcactaactctccatttccccctccccctagctcttagcaaccaccattctgctttctatatgtatgaatttgactatggtatatgtctcatataagcagaatcatacagtgtttacttttcgtgactggtctatttcacttcacatcatgtcctcaaggtttatccattgcagcatgtatcagaatttccttctttttaaagctgagtaatattctattgcatgtgtatatcacatcttgcttatccattcatctgttgatagacacttgggttgcttccaccttttagctattgagaataatgttgctatgaaaatgggtttggaaatttctcttcaagatacactgctttcagttcttttttttttctctctgagacagtctcactctattgcccaggctggagtgcagtggcacaatctccgctcactgcaacctccacttcctgggtccaagcaattctcctgcctcagcctcccgagtagctgggattacaggctcacaccaccgcacctgatgtgtgtgtgtgtgtgtgtgtgtgtgtgtgtgtgtgtctgtgtgtgtttagtagggatgaggctttgccatgtttgtcaggctgctctcaaattcctgatctcaggtgatccgcctgcctttgcctcccaaagtgctgggattacaggagtgagccaccacccctggcttcagttctttggggtatataactagaagtaaaattgccagatcatgtggtaattctatttttactttttcaaggaatcactatgtgttttccatagcatctgcaccatttttcattgttatcaacaattcacagggttccagtttccccctatccttgccaaaacttgttattctgttttgttttatggtagtcatcctaatgggtatgaagtgactaggatcattttgagacccaaacagtcacaggcttttttgttgttgttgcccaggctggagtgcagtggtgcaatcatagttgaccgcagcctcaacctccttgggctcaggtgaacctcccacctcaggctcccaaggagctgggactacaggcacacaccaccacatccagctaatttttgtgtattttgtagagacagggttttgccatgttgaccaggctagtcttgaattcctgggctcaagcaatccacctgcctccagcctcccaaagtgctaggattataggcacccagcttcataggctttttagcccaggcttgtgatttctttgtcagtataattctctgaaaaacttaggtttctggcagggggcagtggctcacgcctgtaatcccagcactttgggaggccgaggcggacggatcacctaaggttagaagttcgacaccagcctgaccaacagggtgaaaccccatctctaccaaatacaaaaaattagccaggcatggtagcatatgcctgtaatcccagctacttgggaggcggaagcaggagaatcacttgaacccaggaggtggaggttgcagtgagccaagattgtgccattgcactctagcctgggcaacaagagtgaaactccatctcaaaaaaaatcttaggtttcttatcgatttgactgtagttaatggtactaaaaccatacccacaatacttttcaatatattgtcctcaagtctgctttttccctttgctttctatcctaaagctgtcactctcaatgtaatggcaattagcaagaataacaggtggcagagttgcacctctaaagtgatcttggctctgagagtttttacaggacatttttcactcaaagccttttaaaaatccaatctcatactttagttgattctagccttgaagtactttaattgataaaaaagaaagttcataaggtcattgggaagattaattatcccagcatatagtaaatgctctataaatgatacccatctttgtcacttttttttttttttttgagacggagtctcactctgtcgccaggctggagtggcacaatcttgtattactgcaacctccgcctcctgggttcaagcaattctcctgcctcagcctcccaagcgagtagctgggactacaggcagcatgctgccactcccggctaattttttttttttttttttttcagtagagctggggtttcaccatattttctttctttctttctttcttttctttctttctttctttctctttcttttcttttcttttctttttctttctttcttttcttctcagagtctctctctgtcacccaggctggagtgcagtggcatgatcttggctcactgcaacctctacttcaagtgattctcctgcctcagcctcaagagtagctgggactacaggcatgtaccaccatgtccagataatttttgtatttttagtagagacagagtttcaccacgttggccaggctggtctcaaactcctgacctcaagtgatccacccacctcagcctcccaaagtgctgggatcacaggtgtgagccaccatgcctggacaaattttcctatttcttaatagataatccatcttgtttttctcaaaagtagacagtttatcaggtgtcgtgtctctcaccttcccaccctactcacctataaactaatataacaataacagtaacaataaccataatttgctgagttctaattttgttccaggtactttggataagtgtcttatatgcacatctcatttcactctttcaacccctctgagaggcaagtacttaaattatcttcattttacagtcagggaaactgaggcacagagtgtttaaatcatgtaagcagtaagtagtggagctaagattcaaacgcagatctgctggactccagagttcaacttacagacactacattgtggctcttcttggtggccccctcccctcctccccaggctctcagaggatacaggatccctcctttgctagtcaaggccagcccatccccctgtatatttgacttcatctcttcccactgccccaggatttcatccacccctgctctgatatcaggggccccctccccttctgtccatggtgtggggctttttgcacttcacacacacacacacacaggtgcacatacatacacaccccttctccaaaccactccacaaagggcccctgcctcctcactttcttgccttccacatcacaccctaaattctcctggccaaggttcccactgacctccttgttgccaaacctaagtcctgttgtcccgctgtgtgtctcttatgcacttggcaaggctgagcaggtccttcttggaaatgtgtttctttggtttctatgacacaatgcacccccactccaaaacacacatacacacatcccagattcttgcccccacccaccaccacccgctatctctctagatgcttctgtggttctttctcctcctctgacctcttcaaatgtagtatggtggttttaaaacatgtccataatttttttttttttttttgagatagagtctcactttgttgcccgagctggatacagtggtgcgatcaggtgcgtgccaccatgctcagctaattttttttaacttttaagttttttggagagataggggctccctgtgttgaccaagctggtctcgagctcctgggctcaagcgatcctcccatcttggcctcccaaagtgctaggattacagacttcagccatcgtgcccaaccatgtctataaattctttaagactcctcccactgagtaacagagtctgtttcttccccttgaatctgagccaaacttagtgactcagactacagtagaaatgattctatggtgacttgtgaggctgggtcataaaggcaatgtggcctgactcatgggagtcctgagctacagtgtaagaggtgtcaacactctcagctgccatgctgtgaggaagcccaactggctcatgcagagagacaacatggagaggccttgaggctatatgaagagagatgcttggccagctcccagctgctccagctccccagtgctccggcttccactgtaaccacaaaagagacaccaaggcagaaccacccagatgagcccttcccaaattcctgacccacagaaattgtgaaagatgataaaaatcattggatttggagtggtctgttatgcagccatagacagccaaacagaggcatcttaatctgcttgggctactataacaatttagcatggagcaggtggcttgacaacacacatttattcctcaggtctgcagggtgaagagtctaagatcaaggtgctggcaaattccattctgctggcaaccaagggcctgacttctggtgtacagacgaccatcctattgtagccccaaatggcacagagaagaagcaagctctcaagtctcctcttatcaggctgtaatccctcccaaaggcccacttccaaataacatcaccttaggacttcaacatatgaatatgagggagatacaaacattcagtctgcagcagagggcttcgttagagctctgacctgagcacgcttcatctcaatgtcattgtttttgccagctctacatccactgccctttttttttttttttttttttttttttttttttgagacagagtctcactcttatcacccaggctacggtgcagtggcacgatcttggctcactgcaacctccgcctcccagcttcaagtgattctcctgcctcagcctccggagtagctgggactacaggtgcatgccaccacacccggctgatttttgtatttttagtagagacagggtttcaccatgttggtcaggctggtctcaaactcctgaccttgtgatccacctgcctcagcctcccaaagtgctgggattacaggcatgagccactgggcctggccccactgccctttcttacagtaacagtatttcaatttccctttagggaagctcttcaagcaggttctcagtccaagaggtttctctgggttaagcactgccagccacccaaagggtgagcaagtaaccagccaatcagagacactccagtgggttcagtaaatgacatattatctaactggggtgaggggaatcaacatcagggcttttcctgagactataaggagaaacagattcttttcccagcagttaaatttgaagtctgtggccattttgctaccatatagggaaaatctgcctgacattgaagccaacacagatgagggaagagccaagagataaagagaaagatcctgagcatctggatacagccatgcctgaagccagtatcccttgacttctcaattatgtgagcctttatattccctttgtttaaagccagttcaagtttaaaactgccatttccagtgagaacaattccctatgttgtatctaaggccaagaccttgcccctgactctaggccagaatgtcctgtacagtgccattcaactctgccaaaagcaaagggcatcaacttctccacaacctggctttccctcatctattttacatctctgttaatgggagcatcacccacctgacctataaacataaaagtcagcctctatcctctctgtctctctccctctctctgtctctctctctctctctcaatccctgtcacttcccttacttcttagtaaccaagttctgccaacttaactttatggacatttttcacacctgcaccctcctttccatttttcctgcccactccaattcttcatcatttctcacctaaatttttacaaaatcaatagataactaacatagaggtgtatagtaaaaagtgaatttcggccgggcacagtggctcatgcctgtaatcccagcactttgggaggccgaggcaggcagatcatgaggtcaggagatagagaccatcctggccaacatggtgaaacctcatctgtactaaaaatacaaaaaaaaattagctgggcatggtggcatgtgcttgtagtcccagctactggggaggctgaggcaggagaatcgcttgaacccgggaggcggaggttgcagtgagctgagatcgcaccactgccctccagcctggtgacagagcgagactccatctcaaaaaaaaaaaaaaaaagtgaatttcattcccacccttgccatcagttaccctcccccaaggcatctactgttacctctttcttgtctattttcccagaagttctctatatgtgccatctttttgagaatttcaaatggaggcatactatcaagacttttcagaacactgcatccttcttcacttgaagtgtgattaatataaataattatagactaatttcttctttctaatggatgcatagtattccacaaagacatataatgtacataactcgtcttccattgatggatatttaagtggtgtcccagttatctgttagcacagaacaaaaccccccaaacctagtggtataacacaataaccacttgaatatgcttgtgggttctgtgtgtcaggaattcaggcaggacacagtgaggccagcttgtttctactctgcaatgtttgagtcttcagctaggaagatttgaagatttgaaggctgaagctgattcaaatggctggccactggaatcatcttgttcttccccttccccttcgccttctacagtgcaatggcatgatgtcggctcactgcaacctctgcctcccgggttcaagcaattctcctgcctcatcctccctagtagctgggattacaggtgcacgccaccatgcccggctatttttgtatttttagtagagacggggttttgccatgtggccaggctggtctcgaactcctgaactcagggtatccacccgccttggcctcccaaagtgctgggattacaggtgtgagccaccgtgcctggcctcatctggttcttcttcactcacttcttttatgcttgaactgggatgactcaaagctaagcttagctgggactgtggtgccttcatgtgtcctctcctgatggtcttggcatcctgacagcatggcagcctctaagcagacatggagccctaggtaggcatggtgcctcaggctccaagagctagagttctagcagaagttgcctgtacttttatgtctggaccttagaagtcagagtgttacttccaccgtactccattggttgaagcagtcatcagctcacccaagattcagagagggtacaaggatcccacctctctacagaggagtgctaaagaatttgtagctatattttaaaaccaccacaggttgtttccaatctgtagctattcctgtagttcattttacaggctaacatctcttgaatgtcttcatttctctgcaccaggccaagacactgtcatctctgatctctttgctgatctcttgctgtcactcttgtgctcaacatgctgttctcttgacagcagccagaggtcttttcagaatgaaaatcagatcacatcccacccctcttcataacccttccatggctccccactacccttgggctgaagctcaaactccttaccttggcttatgaggccccacaaggtctcacttctgcctgcctctccaatgccatctcctgtcaccatttggggcctttagttttgagctgcaagagttcctcccatcacacacacacacatacacacacacacacacacttaaatgagtaagtaaatagaacatacaaaacgcttaaacactttgcacatagtgagcataataagtttgctactattattagactgtcttcagtaaatatttactgggctgcctactcagtgccaagcactatgggaggctcacagatacaacacgaacaagaaatatgtggccttggccagacgcggtggctcacgcttacaatcccagcactttgggaggccgaggcaggtggatcacttgagctcaggagttcaagaccagcctgggcatcatggcaaaaccctgtctctattaaaaatacaaaaaattagctaggcatggtagtgcgtgcctgtagtcccagctcctcaggcgactgaggtgggaggatcacctgagccttgggagatcgaggctgcagtgagccgtgatcatgccaccgcactccagcctggacaacagagtgagacgctgtctcaaaaaaataaaaattaaaaaaaaagaaaaagaaaaactaaaaaggaagatgtggccctatcttgccgagctcattcttctgtgtgtccccagcccctagcacaaggagaaacagaatagatgctcaagacacaaaggcatgtctgtgcaagggtgcttgatgacggttggaggggcacaatgactttcccaagatcacacagcaaatgtgggacaaaatcaaggctgacagctcatgacagggtgggaggcagatgcagctgcctggcacaggctggctctccagggagatgggcagtgggcacgcattgcccagggcagaactggggctaggggaggaaacaacaagggaggctgtcattagctccttccaaagtggaggtcacttctctcccaaccccgagtcctccacccaaactcccttctcaaggtacaagggctgatcccgtaccagggatgggtagggactcaaagaggaaaagaggatgaaaagaggatggggactgagtgagatgtgaggactccagagggattagcggctctcaaggcaagtgggaggggacttcccggtaggagcccggagacagatgggagcctgtgaagagggcgggggcccggcgaggagaagcggtttctacgctggggtggggctccatgagggggatggagacctggaaaagggactgacggtgcagcgaggagaggaaggctcggttaagggatgggtcttccacgggaggggtggggaactgcgggagtgacggcagcttcggtgaggagtctgaggggctgcgtgaggggctggggcccagggagtccgaggggtctctgtgagggcgctggggtgtccgagcgagcagggaactctggaaggggacaggagccgggggagctgcaggcggccgccgtctgcagagccaggccctgaggcgggccggcgccccctcccccgccccgaactgcggcgcaggcgcgaaccggacccgcctttgctcggcggagacagcaggcagagaggtgagcttagccctgccccacgcgcggccaggccccagccccagcccctggagaacccccgcgctctgcccgcatcctcagcccgggccgtgtcccgccagggccgggacctttgcgcctgagcctcggctttgggaggtgggggtcccagggaagcagcaggggcgggagacagaaacagccccatcgcccctcgacgcctcagggttgataggctgggtagaggcttcaaaggacacccccacccccgccaacacttcaaaaacccattcctacccctctctgcctcagtttctctctagggaaaaggacgcagttggtgtggagcagggcatcggtggtcctgtcaggaagagtggcgcgggtgccggtggggaagggaggcgggaaatggcctgatttccccggccgacaccccctacccatcccccccgggagggcgccccttctcccccgcccgggcagcgctggacgctgtagtgggcgagtctgagggtctgggaaggacacaactgaatgaggctgtgcagaggcgacagattccgtccatcttcgggccctggcttccgtcacttccgcccgtgcctgccgcccctcgcctcctccctccgccgcagtctccccacgtcggacagcgcagccccctccgcctcccgctcccctcccaccgagctcctcccggctcccgggctggggacgcctccctagcggttcccatggcaaccctcgtcccgggtgcctgcgccccgccccccgcccgccagacctactccgtgcagccctgaaacgccaggcggaggggccaggccgagcgggaggcagcgtcaaggtcaccttccctctccagtagcagcaggactgagtgattccatctatttggagtcgcggaagcggtgaattggaggggaggagctgacccaggtcaacagccccgaagccccctccacacctcctcacctgtggccttgaacagtggtctccgcacggaggctcctaccgtcccccaggccccatttcttctccccacccgggcctccccagcgcctcgccggggcgggtaccgcgctggccgcaccctccgcacagcccgccccgcccgcctcctccggcgagccctcctctccagacctctcgccctcctcctccgacggtccttcgctttcagtctctgccttttcccgttctctgtcgtggcttttgttgttgttgtttttcctcctttccttccccgctcttcttttccctgaattgtaagtgaggagggtgtacagccactatttatggacaggctttcttgacagcaatcttgtgtgccgtgtgactccaagcagaacctccaaccgtgtgtgtgtgtgtgtgtgtgtgtgtgtgtgtgtgtgtgtgtgtcgtacctatctgggtatgtctctgtatgctttgtgagtatgtctgtgtgtttctctgtgctgtttcggtgagtttctctatgcagggatttgaggaccacatctgattggaagtgaggggcagctgtcaggacctttatcttaccctttggaacaagcacattgtttcattttgcaggaggctgctaattaaggctgagggccatcatggagactggggtagaagcccagtcctcccccaacacctcctggctttggttcgggccaaacctgtatatggatatacaagtaccttccattcccaagatccgtgtccacttttgtggaaaaaaaaaaaaaggttatttgataggtttctctggaaatctaacagcccttaagcctaagagtctttaatcctgagggaccctgactttcacttccaatggagtcaaaattcattggaatctggaggctttcaggggcagtcctggggaggacctttttatagccttgcagcttgggaactccagcccaagtgtcagccatgacaattacccccaggagggggtctgaaggggagcggagggtgaggctctctcattccagatatggagactaaaaagttcaagatggaagtaatagcaaaaaaattacagtactaatcacaacagctaccatttctcagcattagacacagtaactgtatgaaagaagtatgattattaggtctgttttacagatgaggaaactgagacccagaaaggtggaagcacttgtctaaggtcacgcctccaggaagcagtgtgtccacgactccagtccaagtggtcaggctccagagcccacagtcccaggtactgggtggcctccagagtaaacatgcacatttattgacacctccaattgccaggcactgggctaaggccttcagtgcattggctcattcgcagtgtgctttgggaaggacaggctgggattccaaaaggccagactgtgctatgcgtgtagggtgtctcgagtgggaggagaagcgggtggggcacaaagatttagggggcttatgaaggtcaccatgagcagctcccactaatccctccctccgtcagctgcaccttacctgctccccaggggtccatgatgccgagctgcaatcgttcctgcagctgcagccgcggccccagcgtggaggatggcaagtggtatggggtccgctcctacctgcacctcttctatgaggactgtgcaggcactgctctcagcgacgaccctgagggacctccggtcctgtgcccccgccggccctggccctcactgtgttggaaggtaaggccagatgagcacctcccatgattcctctgccttgatggaggaaatgagtctgaatttgaggctcagaggaaaaaagaagagatagcgtagtagttaggagtcttgcacagtcaagcaacagaaaacccaattcaaatgggtttaaataatgaagggagccttcattgtatttgtatttacatacaaattatttacataattatttacatatttattgtatgtaaataatggtggctcatgcctgtaatcccagcactttgggaggctgaggtgggcagatcacctgaggtctggagttcaacacctgctctgtcagcatggcgaaaccctttctctactaaaaatacaaaaatggaccgggtgcggtagttcacgcctgtaatcccagcactttggtaggcggaggctgaggctggtggatctcgaggtcaggagttggagaccagcctggccaacatagtgaaaccctgtctgtactaaaaatacaaaaattagctgggtgtggtggcgggcgcctgtaatcccggctactcgggaggctgaggcaggagaatcacttgaaaccaaaaggtggaggttgcagtgagctgagatcaatccattgcactccagcctgggtgaaagagcgaaactccctctaaaaaaaaaaaaaaaaaaaaatgagccgggcgtggtggcaggcgcctgtaatcccagttacttaggaggctgaggcaggagaattgcttgaacccaggaggcagaggttgcagtgagccaagtttgcaccattgcactccagctgggcgacagaacaagactctgtctcaaaaaaaaaaaaaaaaaaaaaaaaaaaaaagaaaaaagaagggaaaatgttgctcattttttagaagagacccaaggtccaaggttgcatactttcaggcaaagtttgatccagcagttcaaccctttataccaaggactttgcaagttttcttagtcttcagcctcctcatggtgcccctaccctggtagcctgttagcttcagactctccccacatgttccccaaatggccactactgtgtggactctcaggtcttcactccacaccatctaagggaagtcagcatttcctgtggtatttccttcagaaaagaaaatagcctgtaatcccatcattttgggaggccaaggtgggtggatcacctgaggtcaggagttcgagaccagcttagccaacgtggtgaaacctcatctctactagaaatacaaaaattagctgggtgtggtgatgggcgcctataatcccagctactctggaggctgaggcaggataatcactagaacccgggagacagcagttgcagtgagcagagatcgtgccgttgcactccagcctgcacaacaagagtgaaactctgtcttaaaaaaacaaacaaacaaaaaatggccacaggtactggcttacacctgtaatcccagcactttgagaggctgaagcaggaggattgcttgagcccaggaattcaagatcagcctgggcaacatagtgagacttcatctctactaaaaataaaaaattagctggatgtagtggcgcgggcctgtgatgcctactactcaagaggctgagccaggaggatcgtttgagcccaggaggttgaagctgcagtgagccatgattgtgccactgcactccagcctgggcaacagagtgagactctgtcaagaaaagaaaagagagaagaaaggaagagagaaagcaaaatagtaagatattaaaaacatgttaccatttaccttagcaccaaagaagagagaaatacttaggtgtaaatctaacaaaatatctgtaatatgagaagaactacaaaactcaaaagatatcaaataactaaataaatggagaaatagttcatattcgtggattggaatagtcaagatgttagttcttcccaacctgatctttgattcaatgcaatgccaatcaaaaccccagcacgttattttgtggacgtcaaaatgtcacctcctcagggaggagatccctggactgagtcgggtcccttgctttactctgggcaaactctgtgcccattcattcttcaatacacttaccactttgcacacttgtagtttatatggagaggtaaaagattcagaaatttaaaaatcatttataagaaacaatgcttttaattcccagaagtcctgacaagcattgtgttggctctcattgggtcacttgccagccttgaactaattactatggttaagagatggactatgctgactggcaggaagtgaggttcatctcacttaaatcttactgtggtttctcaatggtagactggagtaccttgccagggcagagaaaaaatgtgaagaattgatgtctttaacagccaaggagactagtcggccagggtgcaccaatgggtcaaggtgtagaggtggcaatgagctgagtgcctgctatgggcatagctctttgctaaatattctcgggagactgaggcagagggtcccttcttttgctttcaaaggacttcactctagtgaggaggtaaggtgccaacctctgcagagaggccaacttacataacttcaggtcaggtctgtagggaacaccaggagaggaaatgatcaaggaagacttccaaggaaaggttagtgtgtatttaaaatttttaagcatcttcttattgcgaggcactgtgctaggctcttgggaacacagaatttaagacatgaggtccctgtcttcgaggaactcttttagctgtggtttatttaatcattcagcaaacatttattcagcctttgctctgtgccggcacgtgctaggcacagaagactcctagtgagccaaaacaggcacagtctgctctcatggagctctcagtactgcgggagaggcagacgtcacttacatagcaaccaaaatacatgtccaagtgtgcacaatggtaagtgtattgaagaatgaatgggcacagtttgcccagagtaaagcaagagacctgactcagtccaggggtcttctccctgaggaggtgaggtttgagatgagatctgatggtgcataggagttaacccaacagagacaggaaggtagaaaggataaagagatgagttgggatggagggaaacacagggttggccggagaaacccactgctaggtgggagctgggaaggaaattaagaggcctcaggattccaaataaaacatgacagtttatgcctcctgtcagttagaccccagcaagtgtgttctgtgattcccatctcctgaggatggatcaaggggttacccttaagtctggtgaggatccaaggtgatcccttggccaggggcccctggctgaccctgactgcttcctggtctgtctgcttctccctagatcagcctgtcctcggggaccctgcttctgctgctgggtgtggcggctctgaccactggctatgcagtgccccccaagctggagggcatcggtgagggtgagttcctggtgttggatcagcgggcagccgactacaaccaggccctgggcacctgtcgcctggcaggcacagcgctctgtgtggcagctggagttctgctcgccatctgcctcttctgggccatgataggctggctgagccaggacaccaaggcagagcccttggaccccgaagccgacagccacgtggaggtcttcggggatgagccagagcagcagttgtcacccattttccgcaatgccagtggccagtcatggttctcgccacccgccagcccctttgggcaatcttctgtgcagactatccagcccaagagggactcctgagctgcccacatggcctaagatgtgggtcctggatccttccccccttctcaccataaccccctctcagtgtttccccaacttctcccttttagcagggtccctttagagcccaactccaggtcaaatctggagctcaaatcccagtgctccctccccaggagtggggccccaactcttccaagataccagcattcctcaagtcctcccaaaacttcctacccacaccctcttcccaaggccctcaggggcagaaaacatctccttcaacccgtccccactccttcctctgcatgaccttgggcaaacccttgccctttcaagccatcagctcctgcctctctgccatgagggctttggatcagattcctcttctcgccaggatgaggacacgcactgccctccatagacacagatgaaggggtgggggtcattcagctcgaatgggtcccagatgctcacttggcctttccctgcaggatgagtgaagacgtttgcctctcacagtgtgtcttctacctgcattttggcatcagagccccccagcccacccaccacaggcaattactagccctagttgataggtgaggtgggtgaagaaggctggaggtgacatgtccgaggtcacacaacaaagcagcatgcaggaactagaaacacatcttcagcctcctcctgggccagctcttgtgctacaggtggggcggagccagcccctcaccttcctggttccctgagggtcctcagggtggaggacaggtttggcccagaaagactagccagaggcctgatggtcccaggtggctctggatatactttggatatggatttaaatggtctctaagagccgggggtagggggcaggaaaagtgggttgtctttgcccctcaaagtccacctacctagaaaccaagcccacggtcttggccgtgaccctgataataaatgggctctctcagaggcgccagcccctccctccccagccggaggcgtcatctctcttctgtaccactagagggagctctgatgcagctggagagcagcgctcaaggctctcgcccctcccctccctaacccttaccttcagtctccaccagcctgaagggcctcctaggggatcctcaggcggcccccaccagggcacaccctactgtccttgtgcctcacgccccctcctcatcctgcaccccttccatcccaccttccctttcaataaacagctgggatggatactgactttgtttcctttctccctggccactggggcgtggggaggagaaagacacagactcaggagcacctactgtgtgctgggcacgacccattatttctcattcgctcctcaggataacctgttgagaaaggaattattgtcttcttttttttttttttaagatgttgtctcgctctgtcgcccaggctggaatgcagtggggcgatcttggctcactgcaacctctgcctcctgggttcaaccaattctcctgcctcagcctcccaagtagctgatattacaggtgcacgccaccacgcctggctaatttttgtatttatagtggagacggggttttaccatgttggccaggctggtcttgaactcctgacctcaaatgatccgcctgcctcggcctcccaaagtgctgggattaccgggtgagccaccttacccagacttattgtcttcattttacagatgcggtaactgatgatcagagaggtgagtgatttattttttatttttatttttaattcttttttatttttttcgagacggagtctggctctgtcacccaggctggagtgcagtggcacgagctcagctcactgcaagctccgcctcccgggttcatgccagtctcctgcctcagcctcccaagtagctgggactatgagtagctgggactacaggtgcctgccaacacacccagctaattttttgtatttttagtagagacagagtttcaccatgttagccagcatggtctcaaatctcctgacctcgtgatccgcccgcctcggcctcccaaagtgctgggattacaggcgtgagccaccgcgcccggcctatttttaattctttttatttcagtagcctttggggtcaaagtgggttttggttacatgaattagttctatagtgattctgagattttagtacacctatcacctgagcagtgtatactgtacccaatacgcagttttttatccctcatcccctcccaacctccctggactcagtccccaaagttcgttatatcactctgtatgcctatgcatcctcatagcttagcttccgcttatataagtgagaacctaccgtatctggatttccgttcctgagttacttcacttaggataatggcctccagctccacccaagtcctgcagtggatttaaatgctcagcctagggcctggaggggtggctgggccaggcgaggtggctcacgcctgtaatcccaggactttgggaggccgaggtgggtggatcacctgaggtcaggagttcaagaccagcctggccaacatggtaaaaccccataactactaaaaatacaaaaattagctgagcatggtggtgcatgcctgtaatcccagctactcgggagactgaggcaggagaattgcttgaacccgggtggtggaggttgcagtgaaccaagttcacaccattgcactccagcctgggcaacagagcaagcctctgtctcaaaaaaaaaaaaaaaaagtgcttagcctgattggcctattgcctgagtgtggagctcctgtctttgggtgggaaggagatttctcagccaccttgagaacacacttcctctagttctgaaaggaatgtgagggccagggtgtgggagagggggctgaagccaaaggtaagatcttttccaggcctggaagagtaattaaccccttttggcactcaccaggggctgggccttgttcttagtgccttacagaattcgggaattcatttaaccaggacgacaacctctgaggtggcggctattattctcaaacctagtttttcctaaactccaggcttgcgttcccatctgcattcacctggatgttgaatttaaactcaactatctcaaactgttctccttgttaccacccctccctgaccaaacctgcctctactatgctgcccacgtcttagagagtagcgtccccattcttctggctgctccagccaaaacctcctctctttcctcacaccctgtatccaatccatcagcaagtcctgtcaactcaaccttggaaatatatcctgtacccaactacacctcgacatccccgtggctgattccatggtctgaaccaccagcgaccagcgcctcgatctggatcattgcaccagcttcccccggtctcctggcttctgagttttgaaccccaccctactccacgccttgactccccaagtctaattactacacagtagccagacagatcttgttagaacataaactaggtcatgttcctcctccgctccaaaccttcccatggctcccacctaactcagagtagccaaaaccctccctgtggcctccaaggccctacacaatttgctgatttccactccccccgcactttcctctgtaaccccaactcccaccactctccaggttcctgtgtcctctccagccaggatcctgactcagggcctttgcctcactgttccctctgctggggtactcctccccagttgacgacatgggcagttccttcaagtcgttgctcaaacatcaccttctcagcaaggccttccctgagcagcctattagaattgcaaccaggccaggcgcagtggctcaagccagtaatcccagcactttgggaggccgaagcaggtggatctcctaaggttgggagttcgagaccagcctgaccaacatggagaaaccccgtctctactaaaaatacaaaatcacccaggcatggtggcacatgcctgtaatcccagctactcgggaggctgaggcaggagaatcacttgaacctgggaggcggagattgtggtgagctgagatcgcaccattgcactccagcctgggcaacaagagcgaaaccccatctcaaaaacaggaaaaacaaaaaacaaaaaaatgcaaccatgccggccaggtggagtggctcacacctgtaatcccagcactttgggaggccaacgtgggcagatcacctgaggtcaggagttggagaccagcctgggcaacatggtgaaaccctatctctactgaaaatacaaaaattacccaggcatggtggcacgtgtctgtaatcccagctacttgagaggctgaggcatgacaatcacttgaactcgggaggtggaggttgcagtgagccaagatcgcgccattgcattccagcttgggcgacagagcgaaactccatctcaaaaaaataaaaggaagctaacacagagtataaatggtgcaggcagtttgacaatatcaaaatagaaaatacacatgccctttgatttctccctcttatgcaggtggatctatagattcaactctacatgttggaacactatagtattatttgtaattaaagcatttggaaacaacctaaatgctcatggtaggggactattaataaaatacggtaaggctgagtgcagtggctcacgcctgtcatcccagtactttgggaggccaacgcaggaggatcacttgaggccaggagttcaagaccaacctgggcaacatagggcaacatagcaaggccccatctctacaaaaaattaaaaattagctgggcatggtggcacacgcctgtagtctcagctattaatatttgggaggctgaggcaggaggatcacaccactgcactttagcctgaatactgagtaacaaagcaaaaccctgtctctcttaaaaaaaaaattggggggaaggacaagtcttttttcttttcttttcttttcttttctttttttttttttttttgagatggaatttcactcttgttgcccaggctggagtgcaatggtgtgatctcggctcacggcaacctccgcctcctgggttcaagcaattctgcttcagcctcccgagtggctgggattatagtcatgcgccaccacacctggctaattttgtattttaggtagagacggggtttctccatgttggtcaggctggtcttgaactcccaactcctggcctcggcctcccaaagtgctgggattagaggtgtgagccaccgtgcccagccaggacaagtcttcttacagaagaattccaattagtaaatgtagaaggattgagagaaattgaaaaatcatcattagaacaccggaataataattgctgcaggcaacatctaccaatgaacaataaaatgagtgggtgaaactttaaggagaaacaaggttttttttttagaaacgggatcttactacattgtccaggctggtctggaactcctaggctcaatgggatcctcccacctcatgctccccagtagctgctactacaggcacataccaccccaccaggcttgaaacaaaatatttgcatagcctcaaagtatctatccccaaatatgtattaattagtatggtggttttaacatatgcatacatgttctttgatgctctgccatctaggaaatggagcttaatttttctcctcttgagtgtgggctggactcagcaacttgcttctaacaagtagaatgtggaaaggcaaaaacagtgacttcacagtggaaaaatctggcagacaccaccttaaccaaatgaaggctggcaccaccagtcaaaagtcttgttgatatcacagcctctgaaatgatgtggtgagaagggcacttggcctgagtggcattcttcccccaaatccgtaacgtcagcctaatcatgagaagacccattctacaaaagatctgaccagcactcttcaaatgtgtccaggtcacgaaagacaaggaaaggacaagaaacggtctcaggttggaggagactaaggagacgtggctgaaggatacacaggatctccctgtactgtccatgtaactcttcaataaatctacaattatttcaaaatagcaaaaaatacgattgctggccgggcacagtggctcacgcttgtaatcccagcactttgggaggccaagaagggcagattacttgaggtcaggagtttgagatcagcctggccaacatggtgaaaccctgtctctactaaaaatgcaaaaattagctgggcgtggtggcatgtgtctgtaattccagctgctcgagtagctgaggcaggagaatggcgtgaacccgggaggcggagcttgcagtgagccgagattgcgccactgcactcccgcctgggccacagagcgagactccgtctcaaaaaaaaaaaaaaaaaaattactgtggtcaagatggaataacagggatctggtttaacacaccccaaaaaggacctaagaaaggaccattccctctcctctctgaggtgggaagatctgggaaggagaggaggctgaccagtggggtctaccttctgctccacccctcttctatccaagagtctgagcacccaacccccacaccaccctggaggctcccgccctcgtgctgagtctggcatgccctccccatccctactggcccaggggactaggttagctcagagaagcccttctaactcacccacaactggaccaaagaaggattgatctggggccactgcctggtccctgggagcactgtgctagggcagggggctgagatgccccagggtaagagacagaacagtgatttttttttttctaagacagagtttcgctcttattgcccaggctggagtgcaatgcgcgatcttggctcaccgcaatctccgcctcccaggttcgagcgattctcctgcctcagcctcccgagtagctgggattacaggcatgtgtcaccacgccccccggctaattttgtacttttagtagacacagggcttctccatgttggtcaggctagtctcaaactcctgacctcaggtgatcctcccaccttggcctcccaaagtgctgggattacaggcatgtgccaccgcacccggccaaaaacagtgatattcatatagatgggggagggattaatgggggtggagtgagagagagcctgctggagcagtccgaaaggcaggcattccttctgttcagcaacattcctgcccccacaatctcctcccacaacttatatctagtgcaggctgagagtgaatctgtctgccagtgttcaagccactgtgtgaacctgagtttcttaaccgttctgagtgtcaggagtttttttcatctccaaaataggagcaacaaggataccaatcccttgagattgtatgaagcttaatgcacttaacacagcacctggcacgtagacatgctccctaaatgccagctgttattatgaaagagagaagtctgaggttcagaactagcaggcaacacataatctataatgatggatggctcagacagggtcctgtcctatagggactcacagtctagtggaaaggacagtcctgtggacagcaaatggcaatatacctgggtaagtactgtaatagaataacaaagtaatatcctatcacggggcagtcacgggggcagtgagagacaagcgcttgtccatgccaggctctgtactcagtccatcacatacattaggtcttgcagtcctcataccaccataaggtggttaccattatctccaattcacagaaaagcaaacagtatggagtgtttaagcgtcctgtccgagatggcatagctagtggagctgaaatttgaacccaagtaatccaggtccagaatgccccggatgcagaaatgaccacacagattctaccaatgaactaacctgataaggttggaggtcatactcataacccctcacacaggtccacacagacacaggcaagcacacccatgtctattcagatacacaccaattcctgtctatgacgagcgctcagaaaatcctccacaacaccacaccaggaatgatgtgcattttgagaaaaaaaaaaatcagctctgaagacctcacagacacatgcagtgaaatgtaaatggagggacccacccaagttcttgaatagcacattacatgcctggatgcacatcagcgggcatgtaaatgatgacgaggaggtctgcagacactgacacgctgcatttgcactcactctgctactgaattttttagcagctacatttactgagcacctactgtatgtaaggaaagataaagcagccgggagctgtggctcacgcctgtaatctcagcgctttgggaggccaaggcaggtggatcacctgagctcaggagaccagcctggccaacatggtaaaaccttgtctctactaaaaataatacaaaaattagctgagtgtggtggcatgcacctgtaatcccagctactcaggaggctgaggcaggagaatcgcttgaacccaggaggtggaggttgcagtgagccaagatcacgccattgcactccagcctgggtgacagaatgaaactctgtctcaaagaaaaaaaaaaaaaaaagtaaaaaagataaagctcagagaagtgaagtggcttgcccaaagtcaaatggctgagattcaaaccctggccctataatattaggcaacggtgtctccctccaccactgtgcagatgcatccatgagtgaagagatgtgctatggctggattccctcattgacattccctgtgaccttggacatggcatggccttgtctggcccacattctcatgttgagtccattcacaggtgtgctccatggatgtgcatggatgggaccggcaaccctggccttgctctgagtctcagcttggcttggtgtcaccagggctgtgagcttccaatcccagccttgccatgtcccagagcacatggctcaaaaccaagctctgggcatcaggccagcagggcccctgtgatggaagaactgacaggatttcataagcatccggcccgggacacgtggtcagggcagggagaagggagataaacaggatgtccaccagggtgtgcacctgggcagggtccatggaccaggtgtggcaggggaagagctgtcaggacttggcatctgatgggcactcagcagatataggctgtgtgaggggaggagtttgtggggaggcagggctgcagctttgcttccatcctggaggccaggaatgagggagtaagtgagccattgactcaatgaatgaatgaatgagcgagtgagtgaaggaaggaaggggtaagtaaataagtgaagaatggaatgggggagggagtgaatttatttatttatttatttatttattttgagacagggtcttgctctgttgcccaggctggagtgcagtctcagctcactgcaacctctacctctcaggctcaagggattctcccacctcagcccccagcatagctgggactacaggcgcatgccgccacatcccgctaatttttgtattttctgtagagatggggtttcgctatgtcggccaggctggtctcaaactcctgggctcaagcgatctgcctgcctcagcctctgcagtgctgagattacaggtgtgagccaccgtgctgagctgtgaatttattttttacacaaatctgagtgctcactctgtgctggccctggacgggtctctgtggatgtctggtgagcaggatggacacagcccggtcattgcaacgctaaaagcttgaatgacaccagtcaggctggggaactgggagggcccttgacatgcagagtgactcagccagtgtgagcaggggttgtcagcatgcctaggggagcaagagactgtgagagatgtgtgtgtatacttgtgtgcctgtgtgtgtccgtgtgtacacatgtgtgcgccgacacagccaggtgttggccaatgcaggtgtggtgtcctcaagagcacagtgcatcctgattcttcaccctcccaggcctcccctgcccctgttgtgtgccagctgggcctgccccatgttatgcctgacgcccacgcaaaagctgcttcttccagtcacaggacaaaggcatcctcagcccagaccctgtaccccaggggtaaagacctctcagacccctagtgctcctcagcatggacctctccaccaggagcctcagagttgtgagaagcacaggcacccaaagcccaccgccctgtgtccatgtgcatggagtgtgcccaggtacacgcaagggctggagatgccccagggcggtccagacagacgtgcagatgacacattggccactgagtttccacagacactgagctaagtgctttcgagacacactgggtgaccttaggcgtatcaccctctctgagcctcagtttctaatctaaaagtagggtaattatactcacttccagtcttgttagaataactcaatgcatgatcagctcaacacatcatgattatttttcctgagttcctgccttcccagctatattgtctattcctcaacagtacccactgagtcttatatccccgtttctcctatgatactccattacacaggactcaaataactacctgctctaagaattgctgagtgacatgtagtcctcataaatagcaataatagtcactaacatttatataacaacaagagccagcaattttgattttttattgtgtcaggcattgtgctgaacactttacattccttcattcatttgacaaacattcactgaacacctggtaggtgctgggctctgtgctagacctgcagatgcagcatctctgccctcaaggttcttacattctgatggggaagaagagacagacaaaagacagtttggcggggcacagtggctcacgcctgtaatcccagcactttggtaagccgaggcaggcagatcacttgaggtcaggagtttgagaccagcctggtcaacatggtgaaacccctgtctctactgaaaaaatacaaaaattagccaagtgtggaggtaggcatctgtaatcccagctactcgggaggctgaggcacaagaatgacttgaacctagaaggtggaggttgtagtgagcagagatcgagccactgcactccagcctgggcgacagagcgagattcagcctcaaaaaaaaaaaaaagataatttaatacataaatgggataatttcaaaccttgacaagtgctacaaataaaataaggaagagttatggattagagacaaactgcagggattaggtggggcatgatgcttgatgagtgatcagggagggcctctctgaggagcaaatatttgatctgagacctgaagaagaaggaagagcctggaaagatacaggaaaagttccaggcagatggcatagcaagggcaaaggccctggggcaggaagaacttggtaggttcgaggactaggagaaagggaccatagctggaggatgattcagcaaacctggcaggtctgtcctggatgactcagcaagccttgcaggtctgttctggtttcagaacccaggcattttgtccttcactccaggctgcctcagagacatgcatccctgccatacacaacaatgtgtgcacgctggcacacatgcacatgcatgcacacacacactctgcatgctgacacacaactaagggccggaccagccatgatagtctaagacactaacatttttctctagtgtcttgtggggccaagtagaagggccagatgtcacctttgcccagccttccagaagttctgggccaaagaaagattaaatggcaggaagagaaaaatggcttaataaggaggtgacggggaactcgggtggcctgtgggggtgcggagatggggggagatgatagagatgtgagagcccatgggcacatcccctctggggaagtgagggagcaccgagaacagagaagcagagggagtggagacggttctcagaagcacagggcctccacactcaccacagcccctactcagccgacatgccttgcttcctctcacctcccctggttcacctcagagatgggacactcattgcccaccagggcagcctgggtggtgccaactgtgagagagctccccttccacatctgcctttgtggctgtaaaatgtggaaagaataagagaaatacctatgaaatctgcaggaagatactttcttttttttttttttttttttttgagatggagtttagttcttgtcgcccaggctggagtgcagtggagcgatctcagctcactgcaacctccgcctcccaggttcaagcaattctcctgcctcagtctcccgagtagctgggattacaggtgctcgccatcacacccagctaatttttttgtatttttagtagagatggggtttcgccatgttgggcaagctggtctcgaactcctaacctcaggtgatccacccacctcagcctcccaaaggaggctgggattacatttttctaaatcagttcggtaaaaatcaaaaattttgagaacacctggtgttgtagttctgggaagcaggtactcacatgctttgctggcaggaggtagattgataacaatctctatagaggaggagccagagatctctcttaaaagtgcaaatgcacaaacttttgacttagaaattctgcttctgggcagggcgcggtggctcacgcctgtgatccctgcctcccaggccaaggttgcagtgagctgagatcgcaccattgcactccagcctgggcaacaagagcgaaactctgtctcaaaaaagaaagaaagaaagaaagaaaaattctacttctaggaaattagctcagaacttctctccacacccccatgtatgaacactgcagcattttttgttatagcaaaagactggaaataattaactgttcattgacaagggatggtttaaataaaccagtacattcctaaccatggaataggaccaagctgtaaaaactgaccaggcaggtctttctggactgacacggaagagtccccaagataaattgttaaataggaaggaaaaaggcaatctgaaggacatggagtgtgctcccatctgtgtaaaaaagtgacaataaatcctcatattttatgtcttgaaggaaacacgagaaaatggcttgaccccaggaagatgaactaggagctggggataggagtgggagggagacttctcaagtattactcttctgtgcctttgaattttgagctaaaatatttaaataaaatattaatataattaatataatacaattaataattaatattgaataaaataaaatatctaaaaatctgctccccgggtgcggtggcccacgcctataatcccagcactttgggaggccaaggctggtggatcacctgaggtcgagagttagagaccagcctgaccaacatggagaaaccccggctctactaaaaatacaaaataattagccgggagaggtggcgcatgcttgtaatcccagctactcagcaggctgaggcagaagaatcgcttgaacccggaagacggaggttgcagtgagccaagatcgcaccattgcactccagcctgggcaacagaagcaaaactccgtctccaaaaacaaacaaaaaaacaaaacaaacaaacaaacaaaaccacaactgtctgctcaaaagtgccatcctcctacacactccttgccctcagctaagttctgtccccatggaactctccctggaagagacaatctgtctcccaagagagcaggcctatgtgtgagtcctggttccatcactgaccctaagtgtgacctcaggcaagacactcccacccctgacttgtactagacagttctccccagcactgacattctgtctctcctgctggaggggcaggagggcaggcacagtgtcttcttgctctgtgattcattcagttcacttaaactgagttacctactccaggccagagtttgggttcatccatttcttgccctccatgcccaccccagggtctggcatgggagttggtaccctataggagttctgaacagactcagcttacggatgaggaacagacggtgggtcagatgcgcggtaaggagggtcaggtacacggcccatgggatcgaatagattcatgggtgggtctttaagacaaccgccttcactcaatcctaagccctccccacagctaccaccctattttttctcccctttgcagaaaagggctttgagaaaattgtctatcctcgctgtttttaattagtcttctctctctctctccctctgagacaggatctgctctctcacccaagctggagtgcagtggcgtgatcatggctcactgcagcctcaacctcctgggctcaaacgatcttcccacctcagcctcctgagtagctgggactacaggtgtgcactaccatgcctggctaatttttgtattttttgtagagactgggttttgccatgttgcccaggctggttttgaactcccaggctcaagtgatccatccacctcagcctcccaaagtgctgggactgcaggtgtgagccaccacacctggccctcttgtctcttaagtccatttaatcatgcttctacctgtcacttccctagttgaaactgctcttgtcaatttcaacacattgctaaatccaatgtgttcagttctcattcttcatctttttttttttttttttttgagacagagtcttgctctgtcacccaggctggaatacagtggcacgatcttggcccactgcaacctctgcctcctgggttcaagcgattctcctgcctcagcctcccgagtagttgggactacaggcacaagccaccaaacccagctaatttttgtatttttagttgagacggcatttcaccatgttggccaggatggtctcaatctcttgacctcgtgatccgcccaccttggcctccaaaagtgctgggattacaggtgtgagccaccgcacccggcccattcttcatcttcttaactgatcaacagtttgacacagctgaccactccctgctctttgatgtacttcttttcacttggtggccaggcctccactctctgctggttttcctccttctcaggctccctgcttctcccattcctgttggagcagtgaggacttggtccctggagctctcatccagtctcacgtctatgactcccaacactgtatcctcagcccagacctctcccctgaactccagcccatacattcaaatacctacctgatgtctctttgaggatgtcaaaagacatgacagactccacagaaccaaagctgaacctgggcttcccccaaacacctcgctccatgtcatttgatggcagttccatacctgtcaccgttcaggccaagaaaccttggaagcaccttgacacctccttttccctcaaactccacatctagaccatcagcaatcctgttggctccacctttaaaatatacccagaatccagtcacagctcacctctagcatggccactgccctgctctgagccactggagtttaagagaattattgcaacacctgctcccttgtcttcctgtccttgcctcattcagtctattccaagtacagatccctaaatgattttattttaaaagtaagtcaaggctgggcatggtagctcatgcctgtaatcctagcgcttgaggaggccgaggaaggaggatcacttgggtgtaggagtttgagacccacctgggcaatgtggcaaaaccctgtctgtacttaaaaaaaagaaaaaaaatggctgggcatggtggctcaccctgtaatcttagcactttgggaggctgaggcgggtgaatcacctgaggtcaggagttcgagaccagcctggccaacatgatgaaaccccatctctactaaaaatacaaaaattagccgggcaaggtgatgcacgcctgtagtcccagctactcaggaggctaaggaagaagaatcactggaacccaggaggtggaggttgcagtgagccaagatcgcgccactgcactccagcctgcatgacaggagcgagactccatctcaaaaaaaaaaaaaaaaaaaaaaaggtaagtgagatcacttccctcctctccttaaaccctcccctgcctccccatgactcctcagcgtcctttcaaaggcctccaaagctccagattatctgaaccccctttacctctctgacctcatctcccaccgcctccctgtcactggctgcactccagccacattgaccttctccgatggcacaccagtcagctagtcagcttccttttggagcttttgcatgagctgttcctcttcctgaagaatttgcccttcggatagtctcagggcatccactgaacactccactcaatacagccactgcctgcccacccaacactcctcatctctgtacttactctttttttcccttgcattcgtcaccccctaacatgtgctacaatgtacttattatggtaattatttcttgcatgtttctttctttttttttttgagacagggtctcactctgttgcccagtctggagtgcagcagcatgatctcagctcactgaaatcttggcctacctggctcaggccatcctccctcctctgcctcctgagtagctgggactacaggcactcaccaccatgcctggctagttgttgtacttttttgtagagatgaggtttcaccatgttgcctaagctagtctaaaactcctaggctcaagtgatcctcccgcctcagcctcccgaagtactgggattgcgggtgtgagccgctgtgcctggctgcacttttccttctaatggaatgtaagcgccacttttgtctgttattttcactgtagtatccctagcctttggaatgttgcctggcaagtagtaggtactcagtaaatatttgttgaagaaacggatgattctataaatagcatggattgatatgggaaagctatgtaggtggatggatggatgcttgtcggatggagggtagatgaaagaacagcgagaaattcgaatggctagatggtggggatgcattataaaataataattcatagatggaaaaggaatgaatagatgggtggagggatttaatctcttcaactactatttactgaccacttgccgtgtgccaggcactgtatgaggtgctagagacactggtgagccacacaggcaaggtgcctgtcctaagggagcctgtagttcagtgggtgaggcagacactaaacaaataacaaatacatacataattccaattatagttaagtgttctggtggaaaagaacaggatgctctgggagagaataatatggataagtgatggaaaaatggacaataaatgggtagatggagatggataggatcggggttatttgccttaaagggcctggcttcaggactggagctgctttaccttaaagggcctgtcggaccacatgtaccatcccacatcccagaccagctctgcactcagagactgtccctctctccctgccctgactcagcacctgcctggcctatccccagtggtcctgcctgactctacctccagctcccaccctgctgagtcacagtcaggctggtcagggggctgtcccatgttcagtccagcccctcagccttcctcgacctgggggggtatggggagcagcccagaggggaggggagcaggtgccaagctcttgattcctgtgcctgagcactgccctgttgagaccagagagagaatctatggctagggtatctggggctacagttggggtttatctggggcctggggtcacacatgatggattagagctaaatctatctccagggttataactcaatcaggagctagaattcaaattcagtttatggatcatgtggggaaaaagtgaccaagacaccgttcagtttgggacctgtgtcggcgttagctgtggctacggcccagggcttagtgatcacaggtcagaccatgttcaaggtttcaggccagagtgcagttgaagtgcaaagtcaggcaatagggttcaccctaggaccacagtcaaggatctgggtcagttagtgtccagggcactggccttgtctcctcttctttgggagagaagccaggtggatgagttggatctaaatgtcctgaggagcaacttccagctcaagttccttcacccaggcggcctaagccctctcagcactggccccaaagccttccttcatccctcaacttcctccatcactccctgacagcctggccttgctcagtgtccctcgcaaggctgaacagtcctcattctggcacctcaggggacagggtaggggtggggactatgggacagggctcagtgctggacccaggagggcgccttgcgcaaggttttctgatgcaactggctgagtgcttcagcattccacccccaccccccaagcttttctcagaaaggcaaggcctgggcagttatccagactgaacatataatccccttccttctctggcctttgatggcttcaggacctgcaggcaaaaggaaggcaggaaggcaggcaggaaggaaggaaggtcaggtgactcagcaatgcgtccagcactgggagctggcagatctggggctccctcatcctccagctgagaggcgagaaagagaatcaggatccctggaagtttggagatcctaaccccttatacatacaaagcagcaattatgtgcctaagcccagggagagacctgtagctgcccaaggtcagaggcaaggtcagaaccagaccagctgtcttcagcccatggctatgatctagctatttccactacacagaaagagagaacccttcacccttgaggaggacacgggacttccccaggaacctcccgtcaatcctgttgaggctcctgaaatggtggaatgacgtggactttggaaccacgcagacctgggtttaaatcccaggccaggcacggtggctcatgactgtaatcccaacactttgggaggctgaggcaggcagatcacttgtggtcaggagtttgagaccagcctggccaacatggtaaaaccccatctctactaaaaatacaaaaactagccaggcgtggtggcacacgcctgtaatcccagctactcaggaggcagaagcgtgagaatcgcttgaacccgggaggcggaggttgcagtgggctgagatcatgccaccgcactcctaggtgagagtgagactccgtctcaaaaagccacactggctagctgtgtaacgctgggcaggttactttcactctttgacactggatttgctcacttgcaaagtgggcgtaaatgcatccttagctcacagggctgtggtgaggctgacatgaggaagcactggaaggcacagcttaggctccacatgggccactctcaggaagtgtgtccccacctccccctttatcctcagctctcactgggtgtgtttgctggggaaggaggtgcagcagccctggggccttggaaataataatagccactcaccctccagtgcttaccatgtgctgggaactctcctaagcgtgaacttaacctgtattagcccatttaaccctccatttaatccaataacagttcccaggccaggcatggtggtgcatgcccatagtcccagctactcaggaagctgaggcgggagtatcgcttgagcctgggaggttgaggctacagtgagtcatgatcaccctactgcactgcagcctgggcaacagagtgagatcttctctcaaaagaaaagaaaagaaaagagggaaggaaggaaggaagggagggagggaaatcccaatgacaataagcagttcaataaccctacaggaaaacactgtcatcaatcccactttatagatagggctgtgggtctgagtagctaagtgactttgtccaagacagtggacaagagaccacacggattttgagccaggccagctggctctgaatcccactgtctcctccctccttaaactagtgatgtcactgctctgagccctggtttcctcatctgtctccagggataaaaatagcagcttcatggggaagtttgaggatgacacaagatgacgtaagggaggtccccacacagggctccacccacaggcatgagaagagcctttctcaggaagaatcccaggccgcccctggggcaaccgccgggctggccttcctgcctctccttaggcccagcctagcgtgatctggatggtgagagatttctgcaaagcccccaggggcctccagagaagggaggtgcccggtctcctagataagggctcccagagaggatcacagccctggagttgccattcttgaatcacccactgtcttccccaagttgattggtctgaatccatgtacttattttttatattagttccataatgtcttccttccaaccagctcatcttttacttatttatttatttatttattttatttatttttttatacagagtcttgctctgtcacccaggctgaagtgcagtggtatgatctcggctcacggcaatctctgcctcctgggttcaagcgactctcatgcctcagcctcccaagtagctgggactacaggtgcatgccaccacgtccagctaatttttgtatttttagcggagataggtttttgccatgttggccaggctggtctcaaactcctgacctcaggtgatccactcacctctgcctcccaaagtgctgggattacaagcatggaccactgtgcttgaccacaaccacctcattttaaaaaacttatctaaatttatttaacatggaaattttaaatcactgacctcaaatagaaaactactatgatttgccataaagaagaggtaagcatacaattacatacaaaaaaagcagaaccaggttattccattccagctaaatcctgtttcttgctgaaggctccaagctgaactctgctgtctcattcttaacaagagaggtgttaaaaacatagaagctgtgaggccgggcacggtggctcatgcctgtaatcccagcactttgggaggccgagcgagtggatcacgaggtcaggagatcgagaccatcctggctagcacggtgaaaccccgtctctactaaaaacaataacaacaacaacaacaatcagccgggcgtggtggcgggcgcctgtagtcccagctgcttgggaggctgaggcaggagaatcgcttgaacccgggaggcagagattgcagtgagctgagatcataccactgcatttcagcctgggtgacagagcaagagcaagactccgtctcaaaaacaaacaaaacaacaacaacaaaaaaaaaaaccatacaagctgttggccgggcgcggtggctcacacctgtaatcccagcactctgggaggccaaggtgggtggatcacgtggtcaggagatcaagaccatcctggccaacatggtgaaaccctgtctctagcaaaaatacaaaaattagctgggtgtggtggcacacgcccatattcccagctactggggaggctgaggcaggaggatggcgtgaacccgggaggcggagcttgcagtgagctgagatcacgccagtgcactctagcctgggtgacagagcgagactccgtctcaaagaaaaagaaaaaaaaaaaaagaagctgttaaatgagactttctccctgagtctttggagaaacagcaagaaaactgaaagggtttaagtgtatcacaattatgattcaaagttatgtcatacggtatctggagaccctaaaaccctctggcactcagccattgttgtacatggtatatttcagaaaacactgacctcactgacctactccaactttctcttcttattttacagataagaaatttgaagcccccgcaaagggaggtgacttgtccacaatctcacaggctcagtggcttcagccagacttggaacgcaaccagaagttctaaggcatcatgtcacttttgtgggggaaatgtatgaagatgaaaagtttcaaggacacctatggtggaattttaggcatatggcaatcactagggacacccatgtggaaggaaaggaggcaggcatggctcatgtcattgctgtgggccccacatcagtgctgggggtcagagacggaactcatcagaactatagcaaagaggccgggcacagtggctcacgcctataatcccagcagtttaggaggccaaggtgggcggatcatttaaggtcaggagttcgagaccagcgtggccaacttggtgaaaccccgtctctactaaaaatacaaaaacattagccaggtgtggtagtccacacctgtaatgccagctactcagggagctgaggcaggagaattgcttgaacccgggaggcagaggttgcagtgagccaagatcacatgccacttccctccagcctgggcagcagagcgagacactgcctcaaaaaaacaaacaaacaaacaaaaaaccaaacctataggaaagagaaaagcagccttctgggctcagaaatctgagtagaaagatgttctgagcctggagaaagaaattcataaaagcctgactctctctccagaaaagagtacatttctgcatttaattttgggaggttggtcaccattcttttcctcgcttctaaataaatgcttatatagcatttatattccagtcactttacaaatattgtcatttaattctcatgcaaaccaacgaggtaggaactattgttatccccattttacagatggggaaactgaagtacaaagagctgaagtaacttttccaaaatagatgtggttttgaacccaagaaatgtgatacaactatgacatgaggcagtcccaatgcattgaatccttatgactgcaatgcaagggaggtataattaactgcattttatagatgcagaaactgaggcttgaggctatttggtgtttctggtgtagatctaggagccaaactccagcctacctagactctttgcctctgctgtacccctggaccatgtgttaggaattcttggtacagggtggtagtgctcaatatggtagtggttttagtctgttttctgttgcttataacagaatgtctgaaactgaacaattttgaaagaaaaggaatttattccttacagctatggaggataggaagtccaagattgagggggcacttctggtgagggccttattcctggtctctgaagtgtctggaggtggcacagggtatagcgtggagaggggactgggcatgctgacatgctatgctttggtctctcttcctcttcttataaagccaccagttctcctcctgtgaaaacccacaaatccattaatccatgagtgggttagtccattcataagggcagaggcttcatgatccaatcacttcttaaaagtcccaaccgctcagtactgccacattgggggattaagtttccagcacatgacatttgggggacacatttaaaccatagcagtagccatttgccacatgtggttattgagcacttcaagtatggctaatgtggctagtgtgactgagaattttttattttattgaatattttaatttttttttttttttttgagatggagtctcactctgtcgcccaggtcagagtgcagtgtcatgatctcggctcactgcaacctccgcctcccggggtcaagtgattctcctgcctcaacatcccgagtagctgggattacaggtgtgtgccaccatgcccggcaaatttttgtatttttagtagagacagggtttcactgtgttagccaggacgatcttgatcttctgacctcatgatccacccacctccgcctcccaaagtgctgggattacaggcatgagccactgcgcccagcctcacattatatttctattggaacacagaatggtctagagaattgggatttgacaaacccagctgtgacaagtcaccaaaatttgggggccatacccagggtgccgttcctgtcacgatacccataggtccatgtggaggctgcagggatacaaagctcgtgaaatatcccaggatggcatgggcactggagtcagctgccccaagttcaaatctgaaatcagtctttttgttttttttttttttttgagatgcagtttcactcttgttgcccaagctggaatgcagtggcgcaattggctcactgcaacctccgcctcctgggttcaagcgattctcctgtctcagcctcccgagtagctgggattacaggtacatgccatcacgcccggctaaatttttgtattcttagcagaaaccgggtttcaccaccttagccaggctggtctccatctcctgacttcaggtgatccgcctgcctcagcctcccaaagtgttgggattacaggcgtgagccaccgcgcccagcctgaaatcagtcttatacgaccagctgggtggtcttgggtaggtcccttaccttaactcttcttgtctgcagaatggaggtgacttactgtttttctctgtctccctttcacatctttgcactcttcaccccttctcttccctcagcttttagtttaaacatcacctttctgataagccctgctgaaaatggccaccctcagtcatgacggagaacaagtctttcctattttattcaagaaaatgcatgatgcaatctattttaaatgatcatggttttaattttattttcctgataatggtctatctctccactgatttataagatttgtaagagcaggggtggatcattctggtcactgctgagtccccagcatttagaacaggggctgacacagcacaaaacaacgttagttgggaatgtacaagcaaacccagcacaccttcagaggggtgctcaggaaacagccctcccacctttcttcacccctcacagctgtgggatcttcctaaccatttcggtgtcccaggatagaggatgagtttattcacccctccccagcaggggagttgccaggattaaatgagatcccagaatgccctggtataccctgaaggctctgggacacaggtgagctggtccccagggatttggaaacaggaaaacaaatatgactccaccctgcctcccatccagcctctgcctagaggagttattttattttattttactttttttttttttttgagacggagtcttgctctgtcgcccaggctggagtgcaatggcgcaatctcagctcattgcaactcctgcctcctgggttcaagcgattctcctgcctcagcctcccgagtagctgggactacaggtgtgttttttgtatttttagtaattttttgtacttttagtagaaacgggtttcaccgtgttagccaggatggtcttgatctcccgacctcgtgatccacctgcctcagcctcccaaagtgctgggattacaggcataagccaccacgcccagcctctagaggagttattttacttacttacttatttatttattacacaggatctcactctgtcacccaacctggagtgcagtggcacaatcacgtttcactgtaacctgaactcctgggctcaagtgatcctcctacctcagcttcctaagtagctgggaccacaagctcgtaccaccatgcccgctatctttttctctttgtaaagacagggtcttactatgtcatccaggctgttctcaaactcctggcctcaagcaatcctcccgtcttggcctcccaaagtgctaggattacagacatgagccagctcacccagctgaggagttattttttgacactggtgaattcagatcaaaagggatttctaagaaaggtgctggacccaggccgggcgcggtggctcatgcctgtaatctcagcactttgggaggccgaggcaggtggattatctgaggtcaggagttcgagaccagcctgaccaacatggagaaaccctgtctctactaaaaatacaaaattagccaggcatagtagcgcatgcctgtaatcccagctacttgggaggctgaggcaggagaatcgcttgaacccgggaggtggaggttgcagtgagccgagatcgtgccatcgcactcaatcctgggcaacgagtgaaactctgcctcaaaaaaagaaaaaaaaagaaaggtgctggacgcctaggacgcagaggggtgtttcaccccaaatcaagtagcaccaagccctcccaggccttgggtgcaagcatattaaaggcctctttccctctctgtctccattgtttacactccactgagcatccgcaatgtgccacacactgttctaagcgtcttacacatattaaattatttaatcctcacaacaactttatgaagtgagcgcaattatgagcccattttatggagcaggaagttgaggcagggttttaggtagcttttctggggtagcactgtgggttggagcggaggtggagtgcactcttaggccagctggctctaggggctcttcaccactaggccgcactgcctctagcaaagggacgcggggaagctcagcagaccttaggcctcccaagggcgccacggtggttcctttgagcccagagtcagctcttaagtccataggccttcctgaagcttctgaaccacttgcccatagctgggcctcaggctggctctcagtagaatgtggagaatggagattcccgcatgtccacttctcctaaaggttttataaggcagtgctgggaatgtgctttataaaaaaggggaagcaccccgacaacagtcactgtttgctcttttaagcaccatcctgagaaggaggaatgttcttcccatttcataggtggggaaaccgaggctcagaagagcaaatttttggccgggcgcggtggctcacgcctgtaatcccagcactttgggaggccgaggcgggtggatcacgaggtcaggagatcgagaccatcctggctaacaaggtgaaaccccgtctctactaaaaatacaaaaaattagccgggcgtggtgcgggcgcctgtagtcccagctactcgggaggctgaggcaggagaatggcgtgaacccgggaggcggagcttgcagtgagccgagatcgcgccaccgccctccagcctgggcgacagagcaagactctgtctcaaaaaaaaaaaaaaaaagagcaaattttttttccaaggtgatagggagagtccgtggctgatgtctgcactgaccagacgcccctagggggccagcgagggcgggtcccaggtgcagcggatgcagaggagagaggcccgggcgcggcgcgggggatggtgcgatcccgggcccgagggcatcagacggcggctgattagctccggtttgcatcacccggaccgggggattagctccggtttgcatcacccggaccgggggattagctccggtttgcatcacccggaccgggggccgggcgcgcacgagactcgcagcggaagtggaggcggctccgcgcgcgtccgctgctaggacccgggcagggctggagctgggctgggatcccgagctcggcagcagcgcagcgggccggcccacctgctggtgccctggaggctctgagccccggcggcgcccgggcccacgcggaacgacggggcgaggtactcggcggggtgcggcctgcggactcgcccggaggccggggggcgggagggggcggccggggaagggggcgccggaagcctctgggcgtctgcgtgttgccgcgtgttacacgcacgcacgccccttacacaccttttcacagaccccgccgtcggggcgcggccaggtcagatcccttttgatccgggcctgggctgagtgctccccccgggcttcaggtgacgcggccccgcggagcgtggggtcgcccgagttgggctggggaagccagggacggaggtgtccggccgtcacccctagaggagggcgtgcgggggtctgttttgcgtgagtgcgggataggggagtcgtgtggtgcggtgaggggcttgtggggggcactggaggactctgggggtggcgggggatccgagggggtcctcgtgaacccgcaggggagagtcctgggtgagggtgggtcccgagcacctgtgtctcaggagatggtgagagctgtctggagggctgggcacttggtggcaggggttggcggtgcaggggacaccgccgggacagggctggggtgccctggagcgggggagccgagggagtgggagcgggggcgcagcgcgcgatctctggcccggcagggccgctggttctccccagtgcgcggctccgggtttgcaggtggacggtgcgcgcgtgtctgcggtgtgtgctgtgcctgcagaccggggagggcgggggacgacagccacctccttccctctgcctcacccccctcctgtcccagggccgcgcttcaatttccgctgaaacttctgactcggacacccgccgcctttcgcttgggctcccacgggaggggcctggctgcggggggcggggcggggtgggggtgcggccttgctcgggtagaccatgggtgtgacagctgggagggctgtgtgtgtgtgtgtgtgtgtgtgtgtgcgtgcgcgcgcgcgcttgcgcttgatgtaacccgccctcatttccctgggtcccgagtgtggcagggaacagcaagaggtagatattaggggctgctttcattccacatcacagattctattctgcagtgtggtctgcaaaatgccttgcccaagatgtatagactcagttaccgcatctgtccccatctgggtggagcttatcccaggccccaacaggctctgagggatggccggggccaaggcagcctggactactgatgtggcacaggccagagggactccaggcagtctcctgctgcacagggcacaaagcatgtgcacagccaggtatcatcctgcgtgactcagaacagccttgagatgtaaggagtgtcatcccagcctcgaacctggggagctttctaagactcccaaggatggtacttatgcatcttgctgtgaagaataacaggatgagtgctaataatgaccatttcctgacacctacctggcaacaggtccataagctctacatgcttcatttgtgttttcatttcatcatcacgaaaaacctgtaagctttgcatcctgttcccactttacaggaactgaggctcagaaagcttgaggaacttgaccaggggtaccccccagctagaaagggtttgagacaggattagaacccaggaatatctgactacagccactccttactgcattcttaccaagccaaagtcatgacctttcactcatgtggggaggccttcccttccaaggcagctcttccatttgggagcagcgtacttggagaggtgggcctctgtctggtaactgactcatgttgccttgttaatcctgccttgaactgttgggaaggtctttaaccaggctgaggtctctcgcaccaatgcccatacctgggcatgcacctccttggaatggagtttaagtgggtgggcagatgggttctagagagaacccgtctgccctgaccatgccctactgccctctccttcagccaccacacacacagtcacacagctgcgtgaatggtggctttcctttcacttaacagttcactctggagatccttccaattaccctataaagagcatcctcaaccttttaaatggctgcacattgttccgttgtgtggatgaagtataatttatgtaaccagccctgtaattatagacagccaattatttctgtcaaaagggctgcaggaataactgtgtatttgcatgcttacacacacacacctctacagaataaattcttagcaatgggattaattgctgaatcaaagctcacacgcttttcatcgttgtttttgttttgttttgttttgctttgttttgagacagtctcactttgttgcacaggctagagttcctgaccatggctcactgaagcctttaccttctgggctcaagtgattcccctacttcaacctcctgcatggctgggactacagctgtgtgccatcatgaccagataattttttttttcttagggacagggtctcgctacgttgcctaggctggtcttgaactcctgggctcaagtgatcttcctgcttcagcctcccaaagtactgggattacaggcatgaagcactgcacccagcctgtttttcattttgatattgtcaaaatgcactcctcagaggtggtaccttttatcctcccactagcactgtcttcattgttagtggctgcactgccactattccacagtataaacccacttttcatgacactgccaagacataagggtctgaaatacttaacagttttcttccacagtccccaaaatacaggcttctcccccagctcaggacatgaagccatcatccctcctcattgcaggagccaaaggctggacctcacctcgattccaccctctccttcacccctcacatccaatccatccagtccatccagtctgccactgagtcctcttgatcttcctcctatgagcccttaacttcgcgtctccatctagcaccccctagtccaggtcaccttctcctgcctggactcgtgcttgtgtgggcctcctagctagtctcactgccccgtcttgtactttcaaatccaccctaaaagcatgatgttcccctgctgaaatccttcagtggctccccactgcctttggataattccaaatcctattgtgtgttaattaggattaggctcagctgtaatatagaaacagccacttaatagctaaaatgaaatagacgtttttttcttctttttctctttttttgagacagagtcttgctctgtccccaggctggagtgcagtggcgagatctcagctcactacaacctctgcctcccaggctcaagtgattctcctgcctcagcctcccgagtagctgggactacaggcatgcaccaccatgcccacctaatttttgtatgtttagtagagatggggtttcaccatgttggccaagatggtctcgatctcctgaccttgtgatctgcctgcctcggcctcccaaagtgctgggattacaggcatgagccactgcgcccagccttcaatagatgtttatttctctcctgtgtaaaaaacctggaggtctggcctgacaactccatgtgtcagggacctaggctcctctcttgctctactgtatgtggtacttctgaagccaaggtagatgctggagctccagcagttaggtccacattccagcatacaggaaaggaggaaatgaggaagttgggccctccctttaagaacactgtcctgggcattgtacacaacacttccacttgtgtcctactagccatatgctgatacaaggatacaagggagacaggaaatgcagtttattctaggtgtccttgtgctcagctgaaaatctcaggttctaatcctatgtaaggaggggagacctgaaactggggaccactaaccacctctgccatatgatgctcgtagagcccttcacaatagggcctctactaacctcaccttatttttatttatttatttatttttgagacggagtttcactcttgtcgcccaggccggagtgcaatgacactatctcagctcaccgcaacctttgcctcctgggttcaagcaactctcctgcctcagactcctgagtagctgggattacaggcgtgtgccaccacgcccggctaatttttgtagttttagtagagacggggtttcaccatgttggtcaggctggtctcaaactcctgacctcaggtgacctgcctgcctcggcctcccaaagtgctgggattacaggtgtgagccaccacgcccggcctattttttttttttttttaacttttcacttttttttgcagtcacgctcattctccaccgtgttcttggggaacatgcagcatgttcttttgcctcttccctcaccccagaacaggggttactggacagcggcatcaacttcacctgggaactggatagaaatgcagattcagaccttctgaatgagctactttgggagtagggcccagcaatgtatgttgaaacaggcctccagatgatctcaatgcttgctcaagtttgagaaccactgaaccgcagtatgactctccgtgtcacctggctaactctgcctcactttcaggtctcagtgtagacaccacctcttctaggaagacctctcttgacccaccagcccaggagagaggcctctctgggttcctagaggcccatgcttctctgtatagtagggctgatcacactgtatgtgatttttttttttttttttgagagagtctttactctgtcaccaggctggagtgcagtggcacaaacatggctcactgaagcctcaacctcccaggctcaagcaatcttcccacctcagcctcccaagtagctgggactacaggcatccaccaccacacccagctaattaaaaaaaaatttttttttgtagagacagggtctcactatgttgcccaagctggtcttgaacttttgggttcaagcagtcttcccaccatggccttccaaagtgctaggattacaggtgtgggccactgcacctagccttggacgtgattttattactcatctgccctccaaattgactggaagatcctgacggcaagactgctgtctaacctacttctcttcctagcacccagtgttaagtgaatgaacaagatcatatctctcatctgtgaatgtacgagagccatggattatgagattagttgattttcttaactataatttttagaaacaagctgtgtttttaagcaggtatttatttccttaaatgtacatttctgattacaaaatacttttttttgagacagagtcttgctctgtcacccaggctggagtgtagtggcacaatctcggctcattacaacctctgcctcctgggttcaagcgattctcctgcctcagccttcccagtagctgggattacaggtatgcaccaccacgcccggctaattttttttttctcccgtgacggagtcttgttctgttggccaggctgaagtgcagtggtgtgatctcagctcactgcaacctccacctcccgggttcaagtgattctcctgtctcagcctcccaagtagctgggattacaggcccacgccaccacgcctggctaatttttctatttttagtagagatggggtttcaccatgttggccaggctggtctcaaactcctgacctcatgatccaccaccttggcctcccaaagtgctgccgtgggctgcactttggcattgccttggtcacgtgctgctacctgggattacaggcataagccactgcgcctggcctaatttttgtattttttagtagagacagggtttcaccatgttggccaggctggtcttgaactcccagcctcatgattcgcccaccttggcctcccaaagtgctgggattacaggcgtgagccaccacgcctggccaggaaatacatttacatggctcaaattcaaaactataaaagtcggccaaacatggtgactcacatctgtaatcctaacactttgggaggctgaggcaggaggattgcttgagctcaggtgagaccagcctaggcaatgtagggagacccccatctctacaaagaataaaaaaaaattagtcaggcatcatagtgcacacctgtagtcccagctacttgggaggctgaggtggaagaatcacctgaaccctgaggtcgaggctgcaagtgaactgtaatagtaagagtctcctcctaatcttgtgcatcctttcagagagagagatgatagatattcaaacaaatacatacatatatataacatatttatatatattctttttaacataaaagtatagccaggtgtggtggttcactactagagtcccagctacttaggaagctgaggtgggaggttcacttgaggccacgagtttgagaccagcgtgggcaacatctcttggggaaaaaaaaaaaaaaacccaccataaaagcattctataacacgtaattctgtgtttgtctttcttctcttaatacatcttggagatcagtacgcatcagtatatagagagcttccttgtcctttttcagggctgtgtagtattctgctgtatggctataccatgatgttttcactagctttctactgcctgacatttgggatatttcctgcttttgctattggacacaaggctctgatgaacagcctttactatatttaatttttttgtgagaagtttaactggaagataaattcccagaagtggggcacccagttaaggatatgtgactttgtcattttaacacacactgccagatcaccccctataaatgttgtgccacgtatcctcccaccagcaggggaaaggaggggccaccaagcagtctcactttagtgcttttctctcctttttaccagatgcgagccacccctctggctgctcctgcgggttccctgtccaggaagaagcggttggagttggatgacaacttagataccgagcgtcccgtccagaaacgagctcgaagtgggccccagcccagactgcccccctgcctgttgcccctgagcccacctactgctccagatcgtgcaactgctgtggccactgcctcccgtcttgggccctatgtcctcctggagcccgaggagggcgggcgggcctaccaggccctgcactgccctacaggcactgagtatacctgcaaggtacgtgcccatgggcggctgtcccccagcaccacaggaggcctgggaaggaggcctccaaaggattgccagggtgcagaggggtccttatgttcattcattcttgtgtttgtttagtggggaagcatccagggagcccctgctggactgatactagagaggtaaaccagaggtcgtcccagtcctgggggagttcacagcttaggccctacagtgtgataaatgctgcaggggtagaacttagggatcatgggcgcagaaaaggccgagcagaagttagccaggtagaagtgggagatgggagttgcaggcagggggaacagctgttcaaaggcctagaaaagtgaggggatagcactttagagaatgaaaaggacttctctgtggccagagtggagaggatgtgcagaaaggggcaggagatgaaggttggcagcagctggtcatgaaggtgttaacaaggggcctccactgggctgtgcggagctactgaagatgtttgcacaagagaagggtagggcatggtagacatcaaaactcctgggacctcggaggtgatcgagcctaacctggggccattttacagataggaagactgagatgaagacaggagaagggccatgcgtgaagtcacatagcactgggcctggctcctggggtaaactaaggggtagaaaagtctgaggattcctggcagaaaccaggaaatggacagggtcaaggcccctgagggtcagcccatgcaggacactgacaagtgacagtccaagaagacagagatgagaataaaaagtgtaacaataggtattcactgtgcaccaggtactatgatgattgcttagtgtgcacaatctcttttaatcttgacacaaccaatgaggtggtttctatcattgtgccccttttatagatagaggacactgagactcagaaagccatggttacttgccacatgacagagccaggtggtatcagagctgggattgggcccaggaggctgagcccagagagtcctgtgcccgtgctaggataagcgtttcacacaatcagggcaggctgccctggcaggcaagcataaggaagataagggggacctggaaacccaagggagagtagcgggggcctgggtcccttgggaatgcacagagaagcagaaggacttaagcctcctcctggggcagcagcagagctttgctctgttgacggagatgcagtgaacagcggggcagatccagacagggtccagcccctagcttcacctggcctcttgtgcacagatctccagcgcccttaccaggtgccctaaggagcccagaactctgggtccccttcctgcagcatcacaggctcttttccactcccgctggggaggtgagtccatgataagaggaataacccaagcaggctcaggagagaagcgccatgcgttcacagggccctgattctcaagaaacatttgggaaaatccactggaacatactcacccctatgccaatgtgcaccatgggtgctgaatggtcatttccacacttcctcagcttttctggtcagtgtgtagaaagatcaaaatcttgtctttgtaaatgatcaacttattcattaattcaacacaacttcattgagcacccgtatttgccatgtaccatgctgtggttaaaaaacaaagttctgttctcatcaagctgacgttctagtgggagatacagacactaaacaagcgaataagtaaaatacgtgtcaggtggccgggcgcggtggctcacacctgtaatcccagcactttgggaggccgaggtaggcagatcacctgaagtcaggagttcgagactatcctggccaacatggtgaaaccttgtttctattaaaaatacaaaaaattagccgggcatggtggcaggggcctgtaatcccagctactcgagaggctgaggcaggagaatctcttgaacctgggaggtggaggttgcagtgagccgagatcacaccactgcactccagcctgggcaacaagagcaaaactccgtctcaaaaaaacaaaaaacaaacaggaaaacccttattccagcatctttcttggttcctttgcaatgcttatcagcatttgtcaatatttggtttctgggcatgtttgcatggcctcccagtgggcaccggagagcagagcccatggctgtcagtctagctggacatgtggctggcccgtgcaggcccagggccagcatactgaatgaatgaaagcgtgggtgggcaaagaggacgggagctgtgacggtgatgagcatcaggtgccttctgcatcatccgcccttccggattcctcctgctttgtgggttatttttctgtttgggtgacctgttacttttcagttatccgatgtttgaggccatatagcgtagcagttaagagcacagacaaaaggccgggtgcagtggctcacacctgtaatcccagccctttggaaggctgaggcgggaggatcacctgaggtcaggagttcgagaccagcttagccaacatgatgaaaccccatctctactaaaaatacaaaaattagctaggtgcggtggcacatgcctgtaatcccagctacactgggggctgaagcgggagaatcacttgaatccaggaggcggagtttgcagtgagctgagattgcgccagtgtgctccagcctgggtgacagagcgagactccgtctcaaaaaaaaaaaaaaaaaaaaaaagcacagacagtggagtgcatacgtgcaaatctcagccgtgctgtttgctggctgtgtggcctctcagcttcgttaaccgtaaaatggagcaagtcatcctaccttataggaccatggtcagggctgagtgactcggtcagtgaagcgcttggtgcgatgcctagcacatggtagtgtctaataggtcagctgtgactgtttgcaatgccagcctcagctcccgggagtccccagctgtgctaacaccatgctctgcccacaggtgtaccccgtccaggaagccctggccgtgctggagccctatgcgcggctgcccccgcacaagcatgtggctcggcccactgaggtcctggctggtacccagctcctctacgcctttttcactcggacccatggggacatgcacagcctggtgcgaagccgccaccgtatccctgagcctgaggctgccgtgctcttccgccagatggccaccgccctggcgcactgtcaccagcacggtctggtcctgcgtgatctcaagctgtgtcgctttgtcttcgctgaccgtgagaggtgagtgtggtctcagagaccccagccacagacacacccagggggtgggccatgatggagagaaaccgaggcccaggaaggcaaggtaacttaggcaagaagtgggagaaactgaagtaaccagcagcccctgtttagttccctgagaagagttgactcaggccaggtgcagtggctcacgcctttaatcccagcactttgggaggccgaggtgggtgaatcacttgaagtcaggagttcgagaccagcctggccaacatggtgaaactccgtctctactaaaaatacaaaaattagcctagtgtggtggcgcacacctgtaatcccagctactctgaaggctgaggcaggagaactgcttgaacctgggaggcggaagttgcagtgagccaagatcacgccactgcactccagcctcggcaacagagtgagattccatctcaaaaaaaaaaaaaagagttgactcagtcctcttgggagccccttgggattctgggatggagcactgagatgtgaaagtcatagtagccgacagtgacgaaagcatcgccacattatctaacgtggtcttccatccttacaaacacgaggcaggtactgttattatccccatatgatcaaggaaactgaggcccagagagctcaagtaacttgcccaagatcccatagcagaataaatggtagagctgggatttgaacctagatctgactccagagcctgggtcttaattcaatctgagcttgagaggcaggggcctggctgggcttaccaactgactttgggtgacctagtgtctctgagcctcagtttctccgttggtaaggaaaagggctggattgttagggtgttttcaggattccaagaccacagccaaaatagggtctgaggttccccacacgggaacgttttctgtgaaactgagaattagcactttttggttaaaagaatcttccttctctaggttgggatgctaagaatttttttttttttaattgagacagagtctcactctgtcacccaggctggaatgcaatggcgcgatcttggctcactgcaacctctgctgcctgggttcaagtgatacgcctgcctcagcctcccgaatagctgggactacaggcatgcgccaccatgcctggctcattttttctatgtttagtagaaacggggttttgccatgttggccaggctggtcttgaactcttgaccttaggtgatccgcctgcctcggcctcccaaagtgctgggattacaggtgtgaggtactgcacccagcctagacgctaagaaaaatttttaaaagataattctggggagaagggcagagagactcgcctcctgttccctctccagattcctgggggcagtcaagatgtgtcagggagtgcactaagctgccagttacacaggagttttctgtggagaaaggagtgtgaccccatggcattttaaaaaactttttatcttgaaataattttagacttttagaaaacctacaaaaatagttcaaagagtttctgcatatcctttaaccagtgctctccaatgttaacacctgacgtagctatggtacaattacccaaactattaactaagccacagattgattcccacttcccgagtttcccactaacaccccttgctgtgcaggatccagtgaggatcccaatttagtcatcagtggtttccttggtctcttccaatctgagacagttcctcagtctttccctgtctttgaagacccatgaccttgacacttttttttttttgagacagggtctcactctgtcacccaggctggagtgcagtggtgtgatcacagctcactgcagcctcaacctcccgggctcaagtgatcctcccacctcagcctcctgagtagttggttctacaggtgtgtgccaccccacctggctaattgagatggggtcttgctatgttgcccaggctggtctcagactcctgagctcaagcaatctgcctgcctcagcctcccaaaatcctgggattataggcgtgagccactgctcctggccataaccttgagacttttgaagagtactgatcagttactttgtatgtccctcaatttggatttgattgatgttttctcacagttagattgcagttatgtatttttggcaagaacaacacagaatcgataggcccctctccacatcatatcaagagatacttgagctgatagtcattcctatgtcgtgaccttgatcacttggttagggcaggacctaccaggtttctctactgtaaggtcctaatttaccctttgtaattgacaaataccttgggggaggtaagctaggcatataaatatcctgtttttcctcaactttcacccactaattttagcagccatccatcttgcctatagcagttattattgtggtgcttgcctaagtctaattttctttttcttttttttctttctttcttttttttttttttttgagacagagtctcgctctgttgcccaggttggagtgcagtggcacgatctcggctcactgcaacctccacctcccgggttcaagtgattctcgtgcctcagcctcttgagcagctgggattacaggcacacaccaccacacttggctaatttttgtatttttagtagagatggggttttgccatgttggccaggctggtctcgaaatccgcctgccttggcctcccaaagtgctgggattataggcatgggccgctgcgcccagcccccaaggctgattttctgttaatatttccttctacattttatattagaacaagcatgccttttttaaagaagtaacatttataatgatgtttaagctagtacataacttcaaacacattttaggcttagggtagatacaactaccccggacctcctggaggagacagcgtgcttcctgctcttttcaagaagtcacttgatggcccacacctgttatcccagtgcttcgggaagccaaagtaggaggactgcttgagcccaggagttcgaggccagcctaggcaacacagaaaaccccatctgtacaaaaaatttataaaaattagccaggtgtggtgatgcacacctgtgatcccagctacttgggaggctgaggcaggaggattgcttgagcccagaagtttgaggctgcagtgaactaggattgcaccactgcactccagcctgggtggcagagtgagaccctatctctaaagaaaaaaaagaaaaaaaaaaagaaaaatcacatgagagtcattggtagaagagggaccgtgagttagatagacctgtgtttaaatcctgggttctgcttcttacctgctttttggccctgagcaaatgacttcacctgcctgagcctttgtttcttcatctgtaaaatgggctaataatgctgacaccccttgtcccccaatactgtgattcataggattggtcagtatttgtgaaatgccactggacacccaggaagtaatgccataaagaagaaactaatagcagtggtaatagaatgattactattaaagtcatctttgagtgctcagtggaagttgtttaaagtagaaattgcaaatggcaggacacactttttttttttttttgagacagggtctcactctgtcacccaggccggagtgcagtggcgcgatctcagctcactgcaaccgccacctcctgggctcaagtcatatccttctgcctcagcctcccaagtagctgggactacaggtgcgaatcaccatgcctgctaattttcgtattttttgtagagataggtttttaccgtgttgcccaggctggtcttgaactcctgaactcaagtgatccccctacctcggcctcccaaagtgctaggattaccggcatgagccaccgcgcccagccttacacacttttttttttgccctgcttacctgtttgtgttttttatataaactggttgccaatattttttaaatggggaccttttcattaaaatacaattcctggcttctcttggggaaaacaatgggaatgtggggccatcttgggaactgcgagggtgggtcacagcactggctctgagtatctgccagccagcgttcccatcccaggcccatgctctacagctgtaaaatggtgtcttccttgcaggctgtagcctagatagaatgaggtgagccaggtaatgagctgggtcaagggccaggaacacagcaggcacttggtaaaccctagaatgcgttgtgtaccctttttaggtagcgcttgtgctgagatgtcaggcacacttcctgtttctctcatcttattacctgcctggaccctaagtttgtagctggtttaagagaggcttaaccctctcagccccatcagccccctccccaagggactctgttgaaaaatgtattcctttcagaattttagtttaaatttaattgctctgtggccttaaatgacttaacctctctgagcctgggcttgggtatctgtaaaacaggatcagacatcacaggactggcttgtgtctgtcaaaggccagcaggcacttggaaagtgggtgccacaagggtgatagcatggggtggtggcatgggggttctgggtaggacctgacccttctgtttctccccatgtcccaggaagaagctggtgctggagaacctggaggactcctgcgtgctgactgggccagatgattccctgtgggacaagcacgcgtgcccagcctacgtgggacctgagatactcagctcacgggcctcatactcgggcaaggcagccgatgtctggagcctgggcgtggcgctcttcaccatgctggccggccactaccccttccaggactcggagcctgtcctgctcttcggcaagatccgccgcggggcctacgccttgcctgcaggcctctcggcccctgcccgctgtctggttcgctgcctccttcgtcgggagccagctgaacggctcacagccacaggcatcctcctgcacccctggctgcgacaggacccgatgcccttagccccaacccgatcccatctctgggaggctgcccaggtggtccctgatggactggggctggacgaagccagggaagaggagggagacagagaagtggttctgtatggctaggaccaccctactacacgctcagctgccaacagtggattgagtttgggggtagctccaagccttctcctgcctctgaactgagccaaaccttcagtgccttccagaagggagaaaggcagaagcctgtgtggagtgtgctgtgtacacatctgctttgttccacacacatgcagttcctgcttgggtgcttatcaggtgccaagccctgttctcggtgctgggagtacagcagtgagcaaaggagacaatattccctgctcacagagatgacaaactggcatccttgagctgacaacacttttccatgaccataggtcactgtctacactgggtacactttgtaccagtgtcggcctccactgatgctggtgctcaggcacctctgtccaaggacaatccctttcacaaacaaaccagctgcctttgtatcttgtaccttttcagagaaagggaggtatccctgtgccaaaggctccaggcctctcccctgcaactcaggacccaagcccagctcactctgggaactgtgttcccagcatctctgtcctcttgattaagagattctccttccaggcctaagcctgggatttgggccagagataagaatccaaactatgaggctagttcttgtctaactcaagactgttctggaatgagggtccaggcctgtcaaccatggggcttctgacctgagcaccaaggttgagggacaggattaggcagggtctgtcctgtggccacctggaaagtcccaggtgggactcttctggggacacttggggtccacaatcccaggtccatactctaggttttggataccatgagtatgtatgtttacctgtgcctaataaaggagaattatgaaataattttatttttctctgcaatttcttccatcctttccaacgatctcttaccagtttttcctgccttcaaaactggcccccatggtgaaaggccgtagagttgtgtcttaacctgggctgagtggtttgtgagaacagattacctggagcccagtgggtcttcctgcactccttctgtttcttctggcagcagcagtgtctctattagggtactttctgagtcaaaatggcttcaacaagatggaaatatgtttcacacaaaacaagaagtcagcagatagggtgggcttcagtgctggtccattcaactcccaaagctgcgcacagggaccccggctctccaggctccttctgtctcttggctgtattgtctcgagactgctggcccaatggctacagcaggtgtcacattaaagaggtccatgaccagaggaagaagccaggggtcattgtagtacctgagaactcagaactctggagtcaggctgcctggaattaaatcctggctccagcactcaatagctgtttgacccttggcaagtttcttaaccactctatgcctcagattcttcatctgtgaaatgggggacaatgatagtacctaacttatgagaactaaatgacttattttgtataaagcaattagaacaagcagcgcctggcataataagcccacaataaaagttactcccggctgggcacggtggctcacgcctgtaatcccagcactttgggaggccgaggtgggcagatcacaaggtcaggagttcaagaccaacctgaccaacatggtgaaaccccgtctctactaaaaatacaaaaatttttagtagagacggggcgtggtggtgcgtgcctgtagtcccagctactcgggaggctgaggcaggagaattgcttgaacccgggaggtggacgttgcagtgagccaagatc

SEQ ID NO: 244 - DNA, 2227 bp, Homo Sapiens
gaaccgccccgcgctgggaatttgcggcggcctccgccggggcagccgagctgaaccggtctcttcctcggaaaggcagggccgaggggcctgcggggcagccatggaggcgacgcggaggcggcagcacctgggagcgacgggcggcccaggcgcgcagctgggcgcctccttcctgcaggccaggcatggctctgtgagcgctgatgaggctgcccgcacggctcccttccacctcgacctctggttctacttcacactgcagaactgggttctggactttgggcgtcccattgccatgctggtattccctctcgagtggtttccactcaacaagcccagtgttggggactacttccacatggcctacaacgtcatcacgccctttctcttgctcaagctcatcgagcggtccccccgcaccctgccacgctccatcacgtacgtgagcatcatcatcttcatcatgggtgccagcatccacctggtgggtgactctgtcaaccaccgcctgctcttcagtggctaccagcaccacctgtctgtccgtgagaaccccatcatcaagaatctcaagccggagacgctgatcgactcctttgagctgctctactattatgatgagtacctgggtcactgcatgtggtacatccccttcttcctcatcctcttcatgtacttcagcggctgctttactgcctctaaagctgagagcttgattccagggcctgccctgctcctggtggcacccagtggcctgtactactggtacctggtcaccgagggccagatcttcatcctcttcatcttcaccttcttcgccatgctggccctcgtcctgcaccagaagcgcaagcgcctcttcctggacagcaacggcctcttcctcttctcctccttcgcactgaccctcttgcttgtggcgctctgggtcgcctggctgtggaatgaccctgttctcaggaagaagtacccgggtgtcatctacgtccctgagccctgggctttctacacccttcacgtcagcagtcggcactgagtccctggcaccaggctctggcgctctgctgggtgggagggtgggccatggagggcatctgaatacaggagtagggggggtgtgggtgtgtaaccagagaccgagagcatgagtggggtgtgcctcgtgtgcgtggattcgtgtgtgtgtgtgtgtcttgtatatgtgtgcgcagagtgcatcattttcagactctactatttccgtcaagtttctgtttgatttggatcatctcaggatcggattctgttttagagtgtttctgggccaggatccgggcccctgccctcctctgcacctgaccacactccctactcagggctagtctgttcttcccggacatcttctggtagccgtgcaggagagggctgggtggggcagaggccaggaggggacctggtgtgtcacctgcccaccacctggctcatccctcaggcccaccctgaccctacattacataggttacgtcagcctactgtggctgttgagcaaagcatttctcctttctgggcctcatttgcactagatgggcctgtggtcccaaagtaggtcagtaggttggggttgctgacaccccttgggtgcagctttgggacagatgagtggctctgtcctgtcactgccctctccctgcctgggggctatgtgcactccagacccctgcccaggctcaggcccatgaggtatggagacaccctggcccccaggagctggaggcaccgcccactcccctggcattccagctttgcaggtgaccctcctctacccaaagctctgtccccctgctcccactccagaagaactgcggcacgtgcttcgggcagcctagccacaggctttgagcgcctgcattcctgggggctggagggtggggtgccaaaggccctgagcaaaagccagagctcctctcatcaaagcctttacaaggtactgggcccagaggctttgccttgacagagtggcccagggtttcaagggaggaggaacctccccctacctaggacccttcctgtggggggtctacagagtcagggacagaagggaagggacccacaggaagtcacagtggtgcccagggatgtgtcagcccccagccacggggacgcgggattcaagaatgaagtaaatacagtcacagccccaaaaaaaaaaaaaaaaaaaaaaaaaaaaaaaaaaaaaaaaaaaaaa

SEQ ID NO: 245 - DNA, 313 bp, Homo Sapiens
  misc_feature (73)..(73): n is a, c, g, or t
  misc_feature (77)..(77): n is a, c, g, or t
  misc_feature (133)..(133): n is a, c, g, or t
  misc_feature (183)..(183): n is a, c, g, or t
ccgggaacaagccatggtggcggcgacggtggcagcggcgtggctgctcctgtgggctgcggcctgcgcgcanaggnagcaggacttctacgacttcaaggcggtcaacatccggggcaaactggtgtcgctngagaagtaccgcggatcggtgtccctggtggtgaatgtggccagcgagtncggcttcacagaccagcactaccgagccctgcagcagctgcagcgagacctgggcccccaccacttcaacgtgctcgccttcccctgcaaccagttttgccaacaggagcctgacagcaacaaggagatt

SEQ ID NO: 246 - DNA, 235 bp, Homo Sapiens
ttttttttttgatttttcaagttacatttattactaatataatttcaattttccgtatgcatatttcaaatacagtcttttgtgataaacagaagtggaaatgttaatctatttaacaagagaacacaattttttaaaatagaaaagtgtggaccatgtagatattagtactttgaatagaaatctaatgtgaaaatttactttctcttaaaaaaacaaatatttctggaatttc

SEQ ID NO: 247 - DNA, 327 bp, Homo Sapiens
aaaatcaaattagagaagaaaactgatccataataataaaaatgtctcgaaaaatttcaaaggagtcaaaaaaagtgaacatctctagttctctggaatctgaagatattagtttagaaacaacagttcctacggatgatatttcctcatcagaagagcgagagggcaaagtcagaatcaccaggcagctaattgaacgaaaagaactacttcataatattcagttactaaaaattgagctatcccagaaaactatgatgatcgacaatttgaaagtggattatcttacaaagattgaagaattggaggagaaacttaatgatgcac

SEQ ID NO: 248 - DNA, 331 bp, Homo Sapiens
cctgcagggcgacactagtggatccaaagaattcggcacgaggaaggacgtacggactgctagtagaggaatatgtcgagtttctctagggcgccccagcaatggccacctttgctagaatatggcatctcttagatgggaaaatgcagccacctggcaaacttgctgctattgcatctataagacttcagggattacataaacctgttgtaccatgcactgagtgactgtggggatcatgttgttataatgaacacaagacacattgcattttcttgaacaaatgggacaaaagtatactctccgcatactggctcccaggtggatttag

SEQ ID NO: 249 - DNA, 520 bp, Homo Sapiens
  misc_feature (488)..(488): n is a, c, g, or t
aaatccaattattacaaagatattatggttggatcaagcagacttcaatgacgacgctgctgttttgagcatgcaacacaccactggtatctgttacactcctgccatgtttcatcaccatgtcccctctctttatttccagcccctgtcaccctcctctgataaacagcattacaaaaaggtaaaatctagagttagtggcaaaatcttcacagtaacctgttaataaagtcgtagatggctgtcaagggcgtcagtcaattggaccttggaaaattaatttgatgcagttttgctccccaaccagctgtgtagcacagaaagggcaagcagcgtgaaatgcatgagttccatgaggcaacgggatctgagaccagtattttgcagacttctccgagcacacgtgtccacagggagtgaaagcatgagttggcggtcctgcgtctacataaaatcctgcctcacagccaagccagagaggcacatangggcccacagtcctgcacatgggacactccct

SEQ ID NO: 250 - DNA, 394 bp, Homo Sapiens
ctgtccatccctgttgatgtgcagctgtctgcctgtgagtctgttgggccttggagacaggagccaggtgaatggcctcagccccggccccggttcagctgtcttcccggttctgtcctcacaagggtcttgtcttcatccaaggtcgtcacaggggacccagagctccagcctcaagcagggcaggagctcctactcaattgggaaaaatgctctgaaatgtcagggactcattcagagtcacagagccaatcagtggcaagactggcattgaaaccccggccctgaggtttctttgcacccaccaaccctaccctgctcctgtgtctgcctctgtgtgctccccaccccgtctccacaccaacccctggggtcgagggccatgttggtaagc

SEQ ID NO: 251 - DNA, 399 bp, Homo Sapiens
cgtgtagtcgagtctatgaggatccccatcaacattgaacttcgagatgggggtgataattcacaatccgtcctttcctcaaagcgctagtcactgacgagttgctagggcttgatgcgaccattccgaaggacgagtgtggccagagacgacaccacggtgaccttccatgacgttgacgttcatgccaatggaattcggcacgtccgggagaaatcccagacagtggccgagacgatgtcagcctctggccgtgttgactggtctgagcagtcgcggttggcgggtgcaaaaatcacctataacgacgacgccggggaaaccggcagggtgacgatcgtgcgggagatgtcggtattgggagctcgggtagacgtcagtattaccgccgtacccggg

SEQ ID NO: 252 - DNA, 3164 bp, Homo Sapiens
gcagccccggcggccgaacgcccgcggcgcgggactccatcgtcagagaagtcattcagaattcaaaagaagttctaagtttattgcaagaaaaaaaccctgccttcaagccggttcttgcaattatccaggcaggtgacgacaacttgatgcaggaaatcaaccagaatttggctgaggaggctggtctgaacatcactcacatttgcctccctccagatagcagtgaagccgagattatagatgaaatcttaaagatcaatgaagataccagagtacatggccttgcccttcagatctctgagaacttgtttagcaacaaagtcctcaatgccttgaaaccagaaaaagatgtggatggagtaacagacataaacctggggaagctggtgcgaggggatgcccatgaatgttttgtttcacctgttgccaaagctgtaattgaacttcttgaaaaatcaggtgtcaacctagatggaaagaagattttggtagtgggggcccatgggtctttggaagctgctctacaatgcctgttccagagaaaagggtccatgacaatgagcatccagtggaaaacacgccagcttcaaagcaagcttcacgaggctgacattgtggtcctaggctcacctaagccagaagagattccccttacttggatacaaccaggaactactgttctcaactgctcccatgacttcctgtcagggaaggttgggtgtggctctccaagaatacattttggtggactcattgaggaagatgatgtgattctccttgctgcagctctgcgaattcagaacatggtcagtagtggaaggagatggcttcgtgaacagcagcacaggcggtggagacttcactgcttgaaacttcagcctctctcccctgtgccaagtgacattgagatttcaagaggacaaactccaaaagctgtggatgtccttgccaaggagattggattgcttgcagatgaaattgaaatctatggcaaaagcaaagccaaagtacgtttgtccgtgctagaaaggttaaaggatcaagcagatggaaaatacgtcttagttgctgggatcacacccacccctcttggagaagggaagagcacagtcaccatcgggcttgtgcaggctctgaccgcacacctgaatgtcaactcctttgcctgcttgaggcagccttcccaaggaccgacgtttggagtgaaaggaggagccgcgggtggtggatatgcccaggtcatccccatggaggagttcaaccttcacttgactggagacatccacgccatcaccgctgccaataacttgctggctgccgccatcgacacgaggattcttcatgaaaacacgcaaacagataaggctctgtataatcggctggttcctttagtgaatggtgtcagagaattttcagaaattcagcttgctcggctaaaaaaactgggaataaataagactgatccgagcacactgacagaagaggaagtgagtaaatttgcccgtctcgacatcgacccatctaccatcacgtggcagagagtattggatacaaatgaccgatttctacgaaaaataaccatcgggcagggaaacacagagaagggccattaccggcaggcgcagtttgacatcgcagtggccagcgagatcatggcggtgctggccctgacggacagcctcgcagacatgaaggcacggctgggaaggatggtggtggccagtgacaaaagcgggcagcctgtgacagcagatgatttgggggtgacaggtgctttgacagttttgatgaaagatgcaataaaaccaaacctgatgcagaccctggaagggacacctgtgttcgtgcatgcgggcccttttgctaacattgctcacggcaactcttcagtgttggctgataaaattgccctgaaactggttggtgaagaaggatttgtagtgaccgaagctggctttggtgctgacatcggaatggagaaattcttcaacatcaagtgccgagcttccggcttggtgcccaacgtggttgtgttagtggcaacggtgcgagctctgaagatgcatggaggcgggccaagtgtaacggctggtgttcctcttaagaaagaatatacagaggagaacatccagctggtggcagacggctgctgtaacctccagaagcaaattcagatcactcagctctttggggttcccgttgtggtggctctgaatgtcttcaagaccgacacccgcgctgagattgacttggtgtgtgagcttgcaaagcgggctggtgcctttgatgcagtcccctgctatcactggtccgttggtggaaaaggatcggtggacttggctcgggctgtgagagaggctgcgagtaaaagaagccgattccagttcctgtatgatgttcaggttccaattgtggacaagataaggaccattgctcaggctgtctatggagccaaagatattgaactctctcctgaggcacaagccaaaatagatcgttacactcaacagggttttggaaatttgcccatctgcatggcaaagacccacctttctctatctcaccaacctgacaaaaaaggtgtgccaagggacttcatcttacctatcagtgacgtccgggccagcataggcgctgggttcatttaccctttggtcggaacgatgagcaccatgccaggactgcccacccggccctgcttttatgacatagatcttgataccgaaacagaacaagttaaaggcttgttctaagtggacaaggctctcacaggacccgatgcagactcctgaaacagactactctttgcctttttgctgcagttggagaagaaactgaatttgaaaaatgtctgttatgcaatgctggagacgtggtgaaataggccaaagatttcttcttcgttcaagatgaattctgttcacagtggagtatggtgttcggcaaaaggacctccaccaagactgaaagaaactaatttatttctgtttctgtggagtttccattatttctactgcttacactttagaatgtttattttatggggactaagggattaggagtgtgaactaaaaggtaacattttccactctcaagttttctactttgtctttgaactgaaaataaacatggatctagaaaaccaaaaaaaaaaaaaaaaa

SEQ ID NO: 253 - DNA, 520 bp, Homo Sapiens
tttttttttttttgagacagagtcttgctctgtcgcccaggctggagtgcagtggcacgatctcggctcactgtaagctctgcctcacaggttcacgccattctcctgcctcagcctcctgagtagctgggactacaggcgcccgccaccacagctggctaattttttgtatttttagtagagacgaggtttcaccatgttagccaggatggtctggatctcctgacctcgtgatccacctgccttggcctcccaaagtgctgggattacatgcgtgagccaccgcacccggcctcccctcacttaatttttaaaacccatttctcttctccagcttcacaactggactgaacattgctcaactgctcaacaacattacctatgtcaaaagtgaaaagataaaaagtattgtaaagattgcacagtgagtcaatctgggaagaatatactgtacaatcagcatttcagagctggaagggatctttaagatccaatccagcacccacattttaccaatgag

SEQ ID NO: 254 - DNA, 337 bp, Homo Sapiens
ttaaataactggattgggaaggacaggttactgttactcagccctaccctcttggcagccggagcctggctctgcgggttgctgatgagatggacctgaccctgggtcatgaggttggatacagcatcccccaggaggactgcacggggcccaacaccctgctcaggtgggggcctctgcaggccttacccgaatataattccccttattcagtagaatcaaacccattcctctggcatctcaccatacccggccttcccaatcgaattcctgcagcccgggggatccactagttctagagcggccgccaccgcggtggagctccagcttttgttcc

SEQ ID NO: 255 - DNA, 1271 bp, Homo Sapiens
tgggcgcggccatgttggaggctccgggcccgagtgatggctgcgagctcagcaaccccagcgccagcagagtcagctgtgccgggcagatgctggaagtgcagccaggattgtatttcggtggggccgcggccgtcgcggagccagatcacctgagggaagcgggcatcacggccgtgctaacagtggactcggaggagcccagcttcaaggcggggcctggggtcgaggatctatggcgcctcttcgtgccagcgctggacaaacccgagacggacctactcagccatctggaccggtgcgtggccttcatcggtcaggcccgcgctgagggccgtgcggtgttggtgcactgtcatgcaggagtcagtcgaagtgtggccataataactgcttttctcatgaagactgaccaacttccctttgaaaaagcctatgaaaagctccagattctcaaaccagaggctaagatgaatgaggggtttgagtggcaactgaaattataccaggcaatgggatatgaagtggatacctctagtgcaatttataagcaatatcgtttacaaaaggttacagagaagtatccagaattgcagaatttacctcaagaactctttgctgttgacccaactaccgtttcacaaggattgaaagatgaggttctctacaagtgtagaaagtgcaggcgatcattatttcgaagttctagtattctggatcaccgtgaaggaagtggacctatagcctttgcccacaagagaatgacaccatcttccatgcttaccacagggaggcaagctcaatgtacatcttatttcattgaacctgtacagtggatggaatctgctttgttgggagtgatggatggacagcttctttgcccaaaatgcagtgccaagttgggttccttcaactggtatggtgaacagtgctcttgtggtaggtggataacacctgcttttcaaatacataagaatagagtggatgaaatgaaaatattgcctgttttgggatcacaaacaggaaaaatatgaacatgatattttatagcttgggaagaaacttgcagatgatatgtgctgcctttgcttcttatcattcatggcagattgttagtgctttcaacatttcatttgaaatgggagaagataaaatcacttgatgtaacctggaaactatgctttacatggcaatcaaagccttttgatcatgtacattttatttgatattaaaatcttttataaccagaaaaaaaaaaaaaaaaaaaaaaa

SEQ ID NO: 256 - DNA, 643 bp, Homo Sapiens
tagcattacatgccttagagtagtaatctaaagatgatttaaagtatagaagagggatgtgtataggttatatacaaatgctatgccactttttatcagccaacatcagtctccagggaaggtcttggaaccaatcccccatggatactgagggattactgtattctttacttaaactgatctgcctgaggacacagtttgctattttctttttctacttttccctttcacaatggctcttcctcccactctagaaaataaagccctctatcacatccatctggaatcttactataaagaaaactgaagcagagagatttggaaattttctcagtcacccagttaacaattgatgaagcctagaatcaaacttaggcttttttttttttttttttttttctgtagagacagtctctcactatgtggcccaggctagtttcaaactcctggcctcaaggaatcctcctgcctcacactgccaaagtgctggaattacagtcatgagccatcatgtggggcctaggaaggtcttacaattaagaattaatcccctcatctggcttcagatgctttaggttccaggtaccaaactcaacttaatacgtactctagtagctcctacaagaaatcaaaggtagatgaa

SEQ ID NO: 257 - DNA, 420 bp, Homo Sapiens
  misc_feature (26)..(26): n is a, c, g, or t
  misc_feature (209)..(209): n is a, c, g, or t
  misc_feature (216)..(216): n is a, c, g, or t
  misc_feature (338)..(338): n is a, c, g, or t
  misc_feature (393)..(393): n is a, c, g, or t
aacatgacacagatgttctctaagantactggaaagcctcttaccagcatttgtgttagccagctcacagagaagaaaataacttgcagtagttttataataagtcattggaacattatttaaaatatgtaggacacattattagaattgttgggatctcatagatggaatgggaatgggggtgatatagataaacttactagatatanattaaanttttataaatatttcatatttttctgagtaaatatgattggattatgcaacagcatatgtaatatgggaatgttttgtagataataaaacttacatgatctgtacttccacgtgactgggtnctgaggggagttaaagcctcccgggtgccagccccagtgcttgtccaaatttgcntgacaggtcacatcatatttgtaattc

SEQ ID NO: 258 - DNA, 603 bp, Homo Sapiens
gtcagctcctccgctgtagtattgctccttaaaaacccctctctctgaaaatgacatgccctcgcaatgtaactccgaactcgtacgcggagcccttggctgcgcccggcggaggagagcgctatagccggagcgcaggcatgtatatgcagtctgggagtgacttcaattgcggggtgatgaggggctgcgggctcgcgccctcgctctccaagagggacgagggcagcagccccagcctcgccctcaacacctatccgtcctacctctcgcagctggactcctggggcgaccccaaagccgcctatcgcctggaacaacctgttggcaggccgctgtcctcctgctcctacccacctagtgtcaaggaggagaatgtctgctgcatgtacagcgcagagaagcgggcgaaaagtggccccgaggcagctctctactcccaccccttgccggagtcctgccttggggagcacgaggtacccgtgcccagctactaccgcgccagcccgagctactccgcgctggacaagacgccccactgttctggggccaacgattcgaagcccctttcgagcagcgggccagtctcaacccggcgccgaa

SEQ ID NO: 259 - DNA, 632 bp, Homo Sapiens
gggcaggtggctgcatagtcttggcggaggtgaccaaagccacgtaatgtccgtagttcgctcatccgtccatgccagatggattgtggggaaggtgattgggacaaaaatgcaaaagactgctaaagtgagagtgaccaggcttgttctggatccctatttattaaagtattttaataagcggaaaacctactttgctcacgatgcccttcagcagtgcacagttggggatattgtgcttctcagagctttacctgttccacgagcaaagcatgtgaaacatgaactggctgagatcgttttcaaagttggaaaagtcatagatccagtgacaggaaagccctgtgctggaactacctacctggagagtccgttgagttcggaaaccacccagctaagcaaaaatctggaagaactcaatatctcttcagcacagtgaagcgggagtggaagaaggatctaaagggaaaaactgacatgtttatgttatggaaaaagaaatttttctaagtttcatcacaaactgtgtccagtttctctgtggtgttcatgaaatagctaaaagcaaatgaagtaaagggcatactatggtttttcaaaaaaaaaaaaaaaaaaaaaaaaaaaaaaaaaaa

SEQ ID NO: 260 - DNA, 2427 bp, Homo Sapiens
cacaggggcactgacatctttgctggactcttttaatcctcataaacccaggctgctggcacttgaaatttgagaagggcaatcagtctggcctcctgcctttctggcctgcaggcccagcctggacaaacaatttaggtggagctcctggaggctggaagcagagaggaggtacctcaccatcctctcctgccagctgttgcagactctgcctggggaactgattaagggtgagcagaggcatttatctccatgttaacaagcagatgtcatggcacccccagtaccggagctccaagttccgtcatgtctttggcaaaccagccagcaaggagaactgctacgactccgtgcctatcacccgcagcgttcacgacaaccacttctgtgccgtgaacccccacttcattgcagttgtgactgagtgtgctggtggaggggccttcctcgtcatccccctgcaccagacagggaagttggacccccactacccaaaagtctgcgggcacagaggcaacgttttggatgtcaagtggaacccttttgatgattttgagatcgcctcctgttctgaagatgccacaattaagatctggagcatccccaagcagctgctgaccaggaacctcacggcctacaggaaggaactcgtgggccacgcgcgcagagtaggcctggtggagtggcaccccacggccgccaacatcctcttcagtgctggctatgactacaaggtgatgatctggaacctggatacaaaggagtctgtcatcacaagccccatgagtacgattagctgtcaccaagatgtgatcctctccatgtccttcaacaccaacggcagcctgttggccaccacctgcaaagaccgcaagattcgggttattgacccccgagcagggaccgtcctccaggaggccagctacaaagggcaccgggccagcaaagtgctgtttctggggaacctgaagaagctgatgtccacaggcacatcccgatggaacaaccggcaggtggccttgtgggaccaggataacctctctgtgcctctgatggaggaggacctggacggctcctcgggcgtgctgtttcccttctatgacgcggacaccagcatgctctacgtggtggggaagggagatggcaacatccgctactacgaggtgagcgccgacaagcctcacctgagctacctgactgagtaccgctcctataacccacagaaggggatcggtgtcatgccaaagagaggactcgacgtgtcctcctgcgagatcttccgcttctacaagctgatcacaaccaaaagcctcatcgagcccatctccatgattgtgccccggcagtcagaatcctaccaagaggacatataccctccaacagcaggggcccagccctccctgacggcccaggagtggctcagcgggatgaatcgagacccaatcctggtgtcccttaggcctggctctgagctgctgagaccccacccactgcctgcagagagacctatcttcaattccatggccccagcctcaccccggctcttgaatcagacagaaaagctggctgcagaagatggctggaggtcttcctccctgttggaggagaagatgccaaggtgggcagcagaacacaggctggaggagaagaaaacctggctgacaaatggctttgacgttttcgaatgccccccaccaaagacagagaatgagttgctgcagatgttctaccggcaacaggaggagatccgaaggctccgggagctgttgacccagcgagaggtccaggccaaacagttggaactggagatcaaaaacttgcggatgggctcagagcagctctgagcagagacctctgccctcctcaccctcagggacaccactcggctccatggggaggtttagaaccaaaccacaagtcccctcaaggacaaccactatttctatattttttaccagaaaacaaaactctccatcgctgaaagagattccagtgggacatggtgccgtttttctgtttgccttcttgcaacaacagtttctgaattgactttgttttcagatgatgccttctgttgaattctgttattaagggcccatgatgagctgtaacttctcaagaggaaagaacacagtagaaaactagagctggaaggatctaggttgacctgtctgtgattttcaaactgtggtccagagaataggggaagactgggccagacgcagtggctcatgcctgtaatcccagcactctgggaggctgaggtgggcggattgcttgaggtcgggagtttgaaaccagtctcaccaggcgcagtggctcacgcctgtaattccagcatgttgggaggccgaggctggtggatcacgaggtcagcagttcgagaccagcctgaccaacatggtgaaaccccatctctactaaaaa

SEQ ID NO: 261 - DNA, 535 bp, Homo Sapiens
gcggccgccgccgaaaggagccctcctcgaacatgaactctctggccgggtcgatggtccagtagtggcccttgccgggccgcccaaggcccttgggtagcttgatgaagcactcgttgagcgagaggttgtggcgcacggagttcttccagccctggtaggagccccggaagaaggggaagcggctctgcaggaactggtagatctcgctcagcgtcaggcgcttggtgggtgaactctggatggccatgacgatgagcgcgatgtaggaatagggcggcttctccgggcgccggatgccggcgttggtcttcttggccttggacgggccggacgacgcggggtccatggccgcgccgcctcccccgccgccgccgccgccgccgccgtgcggtggctgctgcttctcgggcgccgaagacatcgggtggctgctgccgccgccgccgctgccgccgctgctctgcgccgcggaccctcgtgccgaattcggcacgaggtgttaccattatttgagtacctgtctctatcaact

SEQ ID NO: 262 - DNA, 971 bp, Homo Sapiens
gattgcttgaggagagaagtatgtgatcagaaagcattctttgtctattaactcctgcccagcaaaagtgaaagaaaattcatgggagcatgcaagaacaaagagcacagcaaagctggacaaacacagcaatccaggcaggggatttccaactcaactctggtatgtaagctgcatgcaaagtcctttttctgtctctggtttctggccccttgtctgcagagatggctcccaatgcttcctgcctctgtgtgcatgtccgttccgaggaatgggatttaatgacctttgatgccaacccatatgacagcgtgaaaaaaatcaaagaacatgtccggtctaagaccaaggttcctgtgcaggaccaggttcttttgctgggctccaagatcttaaagccacggagaagcctctcatcttacggcattgacaaagagaagaccatccaccttaccctgaaagtggtgaagcccagtgatgaggagctgcccttgtttcttgtggagtcaggtgatgaggcaaagaggcacctcctccaggtgcgaaggtccagctcagtggcacaagtgaaagcaatgatcgagactaagacgggtataatccctgagacccagattgtgacttgcaatggaaagagactggaagatgggaagatgatggcagattacggcatcagaaagggcaacttactcttcctggcatcttattgtattggagggtgaccaccctgggcatggggtgttggcaggggtcaaaaagcttatttcttttaatctcttactcaacgaacacatcttctgatgatttcccaaaattaatgagaatgagatgagtagagtaagatttgggtgggatgggtaggatgaagtatattgcccaactctatgtttctttgattctaacacaattaattaagtgacatgatttttactaatgtattactgagactagtaaataaatttttaagccaa

SEQ ID NO: 263 - DNA, 428 bp, Homo Sapiens
tttttttttttttttttgatgcttgcagagcaaccccaataacttgatcttcaagacgggaattacttctgattacactctgagaatatctgtcatctgcctttgacaccttataagttgattcttgagcattaatttctccatcagatagcctttgggttgatgactcaagagatgcttgtggctgcaacacctgtaactcttgcattggaaaaccatcttcttgctttgaagatggatacacatctgagtcaagctttctttcagcataagactttgggtcaggggaagttatgttattttgtaatgtctgacaatgagtagaggatgcaaaagatgatgactggacagcaggcaaaaacttctgggactggggagatgatgactcttgagtctgaacattttgggaagaatgcatagaaatataa

SEQ ID NO: 264 - DNA, 2410 bp, Homo Sapiens
attctcatggtcagtagcaacttttggttcaaatatcccaaaacatgctcaaaagtagaacattttgtttcaatattaggaaagtgctttgaatccccttggacgacaaaagcgttgtctgagacagcatgcgaagactcagaggaaaacaagcagagaataacaggtgcccagactctaccaaagcatgtttctaccagcagtgatgaagggagccccagtgccagtacaccaatgatcaataaaactggctttaaattttcagctgagaagcctgtgattgaagttcccagcatgacaatcctggataaaaaggatggagagcaggccaaagccctgtttgagaaagtgaggaagttccgtgcccatgtggaagatagtgacttgatctataaactctatgtggtccaaacagttatcaaaacagccaagttcatttttattctctgctatacagcgaactttgtcaacgcaatcagctttgaacacgtctgcaagcccaaagttgagcatctgattggttatgaggtatttgagtgcacccacaatatggcttacatgttgaaaaagcttctcatcagttacatatccattatttgtgtttatggctttatctgcctctacactctcttctggttattcaggatacctttgaaggaatattctttcgaaaaagtcagagaagagagcagttttagtgacattccagatgtcaaaaacgattttgcgttccttcttcacatggtagaccagtatgaccagctatattccaagcgttttggtgtgttcttgtcagaagttagtgaaaataaacttagggaaattagtttgaaccatgagtggacatttgaaaaactcaggcagcacatttcacgcaacgcccaggacaagcaggagttgcatctgttcatgctgtcgggggtgcccgatgctgtctttgacctcacagacctggatgtgctaaagcttgaactaattccagaagctaaaattcctgctaagatttctcaaatgactaacctccaagagctccacctctgccactgccctgcaaaagttgaacagactgcttttagctttcttcgcgatcacttgagatgccttcacgtgaagttcactgatgtggctgaaattcctgcctgggtgtatttgctcaaaaaccttcgagagttgtacttaataggcaatttgaactctgaaaacaataagatgataggacttgaatctctccgagagttgcggcaccttaagattctccacgtgaagagcaatttgaccaaagttccctccaacattacagatgtggctccacatcttacaaagttagtcattcataatgacggcactaaactcttggtactgaacagccttaagaaaatgatgaatgtcgctgagctggaactccagaactgtgagctagagagaatcccacatgctattttcagcctctctaatttacaggaactggatttaaagtccaataacattcgcacaattgaggaaatcatcagtttccagcatttaaaacgactgacttgtttaaaattatggcataacaaaattgtcactattcctccctctattacccatgtcaaaaacttggagtcactttatttctctaacaacaagctcgaatccttaccagtggcagtatttagtttacagaaactcagatgcttagatgtgagctacaacaacatttcaatgattccaatagaaataggattgcttcagaacctgcagcatctgcatatcactgggaacaaagtggacattctgccaaaacaattgtttaaatgcataaagttgaggactttgaatctgggacagaactgcatcacctcactcccagagaaagttggtcagctctcccagctcactcagctggagctgaaggggaactgcttggaccgcctgccagcccagctgggccagtgtcggatgctcaagaaaagcgggcttgttgtggaagatcacctttttgataccctgccactcgaagtcaaagaggcattgaatcaagacataaatattccctttgcaaatgggatttaaactaagataatatatgcacagtgatgtgcaggaacaacttcctagattgcaagtgctcacgtacaagttattacaagataatgcattttaggagtagatacatcttttaaaataaaacagagaggatgcatagaaggctgatagaagacataactgaatgttcaatgtttgtagggttttaagtcattcatttccaaatcatttttttttttcttttggggaaagggaaggaaaaattataatcactaatcttggttctttttaaattgtttgtaacttggatgctgccgctactgaatgtttacaaattgcttgcctgctaaagtaaatgattaaattgacattttcttactat

SEQ ID NO: 265 - DNA, 471 bp, Homo Sapiens
ctgtagtcccagctactctggaggctgaggcaggagaatcaattgaacccgggaggcggagcttacagtgagctgagattgcgccactgtactcctgggcaacagcgagactccgtctcaaaaaaaaaaaaaaaaaaaaagaaaccatttattttaaaaatgattagattgctatgcctcaactcatagaagatgaacccttcaagaaaacgtgaagtagaacgggtgggccagaaatgaaaacaggcaagtaaagtatttcttcggaaaacattttatcaaaccaaatgttaaavagactttccttttgtaaaactggattagagaagacttttcaatgggttatctctaggtgatcagtagttgagcacttaaaaactgcagagaaaactgaaagttatgttccagataactttccgttgtttaccaattttcttagacttgtcatcatcaggagcatttgtaaataaa

SEQ ID NO: 266 - DNA, 308 bp, Homo Sapiens
gccacagcagtcgccgcgcgaacatggcggccgaaatccactccaggccgcatagcatccgcccggtgctgctgagcaagatcgaggggcaccagaactccgtcacggccgagctgctcatccccaaggaggacggcgtgatcacggccagcgaggacagaaccatccgggtatggttgaaaagagacaggggtcaatactggccccacatttaccacacaatggcctctccttgctctgctatggcttaccatcatgacagcagacggatatttgtgggccaggataatggagctgtaatggaatct

SEQ ID NO: 267 - DNA, 640 bp, Homo Sapiens
  misc_feature (502)..(502): n is a, c, g, or t
  misc_feature (504)..(504): n is a, c, g, or t
  misc_feature (572)..(572): n is a, c, g, or t
  misc_feature (581)..(581): n is a, c, g, or t
taagaccctcgaaaagatctaagaaagtgtgcatcctaaaacacctgacgaatttcagaatgtgacaaagcgcagaggatgcattatttcaaaacaaaacagaaggctaaaatttgcaggaaaaagaaaatcagtaaaccgggaatcctcggactggattgtaagcaagatttgaatgaataagaagctgaaggtattaaggctgtgatatagaaggtacatatttcatcccacaagagaaaacaataataatcagaaattttcggtgaaaaaaacgcaaaactgtacaggaaaatcatcctccaagtaccagacataaaatgctgcaagcttttgaactaatggcgagagtgtaagaaaatgggctctacttcagtgatcctgtggcaggacgtggatcaagacttggaaccgcagaaaacgaaatcccatagtagcacaaagcttggctgttcagtgaataacatttaaataatcgtaaaatacaaatgttgtttatgtntnttattgtttaagggcatacttaattatggttacaaagtggagtgcaaatgttatttaccatggtttanaaatacagncggaaaatacaaggtggaatgttgaaggaaggccttgggaagtaaattgtgaatgggtt

SEQ ID NO: 268 - DNA, 513 bp, Homo Sapiens
  misc_feature (6)..(6): n is a, c, g, or t
  misc_feature (308)..(308): n is a, c, g, or t
  misc_feature (363)..(363): n is a, c, g, or t
  misc_feature (435)..(435): n is a, c, g, or t
  misc_feature (474)..(474): n is a, c, g, or t
  misc_feature (480)..(480): n is a, c, g, or t
  misc_feature (508)..(508): n is a, c, g, or t
gcagantgtgaggtcatggggaaaagcctgctttccttataagtcctgctgttcatgttggaataaggatctgctcttccttgtttccatgcattttgcaggattccaggtaccattaccacactcttctgacccatgaaaccaactggctgctcacacatcaccaaacaggttgggggttagccttcagcacaggtggatacatctgggattcactgagattcctgccctctcctgcttcctagtggtttgggacaggccctctgcccatccgtcagcagttttttgctttcatacaaacctggaangcactggcatctgcctaaggaaaagtggattctgtgaagaacaagattgaactcnatccctttcctggagtctgacaaaagaaggggataggcttccttgaacattgcctggtcctggacaagggcntccctggacattacttcctccaattttaaaggttacctnctggtnaaatccattttcctcatccacttgaatnggatc

SEQ ID NO: 269 - DNA, 1388 bp, Homo Sapiens
ctggccaccaagcgcctccgtggacacgcacttcctgcgaggcctccgtgcgcaccttggccgagccgaaccgagccgagtcctgtccttccaggccgttcgcaatggtggatgagttggtgctgctgctgcacgcgctcctgatgcggcaccgcgccctgagcatcgagaacagccagctcatggaacagctgcggctgctggtgtgcgagagggccagcctgctgcgccaggtacgtccgccgagctgcccggtgcccttccccgaaacgtttaatggcgagagctcccggctccccgagtttatcgtgcagacggcgtcttacatgctcgtgaacgagaaccgattctgcaacgacgccatgaaggtggcattcctaatcagcctcctcaccggggaagccgaggagtgggtggtgccctacatcgagatggatagccccatcctaggtgattaccgggccttcctcgatgagatgaaacagtgctttggctgggatgacgacgaagacgacgacgacgaagaagaggaggatgattattaggccctcgaccctcgggcctcgggggggagggccctgcacgccgccaccccctccccgcagccctcaccccgccaggagccactgctctcccccttgccctccggtccccttacctacccgcgcccgtctgctctctctcttcatttctccgtagtgcttgtctttgttccaggaatagcgctccagttacctgctgctggggtcggggctggagcctcactcactcggaagtgcttggaagtgtcatctaccctggccatccccgggatccctcccctgctaatctgaactgtgtcctgaaccccagctattggccaggcccctgttacaaactgcgcagaccacccatagccctgctgctgccacctgccctgctgccaggcttacatcttcccagagaactatgctgccacttcacatccactcaccacatcccacctacagactaccacctttcgagatcaggaccaacctggaaaatgccagagttggctatgccttttcagacattgatttggacagctcaccaacccctgaaggggccgttcagcctggttagttttctacctactccgagtgtcctcccctgccccaccagattgctgcaggggcgcggtgtgcctggcagccaaattgttgacacttcttttttcctatgcactggttttacacagctgtcatttttctttcaaaattgcagcagtcccacagatgtgtgcatttggacaaatagtacttaaaaacaaaacaaacaagcactcagcccagctcctcaatactacctggaaaaagcattggcattattttcaataaatatcaagcactaaaaaaagaaaaaaaaaa

SEQ ID NO: 270 - DNA, 1885 bp, Homo Sapiens
gggcaatttgttagttatccgccgccaccaagacgcggcacggcgcctggaccggaggggccccgcgcgggcgcgaactttgggctcgggcgagtgggtggtgctccgcccagcccgagacgggcgggcgcgcgggccaatgggtgccgcctcttggccgcggggggccccgacccgtgggtcccggccaccagcgccccagccccgaggctcagaagcggcaggcggaggcgcggtccgggcgctatggccatgcccggcgggtctcacgcggctgcccctcgcccggcgcgccttcggtagggggcgcccggggcccagctggcccggccatgctgctggagacacaggacgcgctgtacgtggcgctggagctggtcatcgccgcgctttcggtggcgggcaacgtgctggtgtgcgccgcggtgggcacggcgaacactctgcagacgcccaccaactacttcctggtgtccctggctgcggccgacgtggccgtggggctcttcgccatcccctttgccatcaccatcagcctgggcttctgcactgacttctacggctgcctcttcctcgcctgcttcgtgctggtgctcacgcagagctccatcttcagccttctggccgtggcagtcgacagatacctggccatctgtgtcccgctcaggtataaaagtttggtcacggggacccgagcaagaggggtcattgctgtcctctgggtccttgcctttggcatcggattgactccattcctggggtggaacagtaaagacagtgccaccaacaactgcacagaaccctgggatggaaccacgaatgaaagctgctgccttgtgaagtgtctctttgagaatgtggtccccatgagctacatggtatatttcaatttctttgggtgtgttctgcccccactgcttataatgctggtgatctacattaagatcttcctggtggcctgcaggcagcttcagcgcactgagctgatggaccactcgaggaccaccctccagcgggagatccatgcagccaagtcactggccatgattgtggggatttttgccctgtgctggttacctgtgcatgctgttaactgtgtcactcttttccagccagctcagggtaaaaataagcccaagtgggcaatgaatatggccattcttctgtcacatgccaattcagttgtcaatcccattgtctatgcttaccggaaccgagacttccgctacacttttcacaaaattatctccaggtatcttctctgccaagcagatgtcaagagtgggaatggtcaggctggggtacagcctgctctcggtgtgggcctatgatctaggctctcgcctcttccaggagaagatacaaatccacaagaaacaaagaggacacggctggttttcattgtgaaagatagctacacctcacaaggaaatggactgcctctcttgagcacttccctggagctaccacgtatctagctaatatgtatgtgtcagtagtaggctccaaggattgacaaatatatttatgatctattcagctgcttttactgtgtggattatgccaacagcttgaatggattctaacagactcttttgtttttaaaagtctgccttgtttatggtggaaaattactgaaactattttactgtgaaacagtgtgaactattataatgcaaatactttttaacttagaggcaatggaaaaataaaagttgactgtactaaaaatgtatacttgttgccaggaaggtgacctcaaaaattaaaagtataattattcggccgggcatggtggctcacacctgtaattccagcactttgggaggccaaggcaggcggatcacgaggtcaggagttcaaaaccagcctgtccaatatagtg

SEQ ID NO: 271 - DNA, 543 bp, Homo Sapiens
cggcacgaggcgaggcccgggtgagaaacgggggagacgcgaggggcggacgttgtggaggaagatggctgccgcctgggggtcgtccctaacggccgcgacgcagagagcggtcactccctggccgaggggcaggctcctcacggcctccctgggaccccaggcgcgtcgggaggcgtcgtcctccagccccgaggccggcgaagggcagatccgcctcacagacagttgcgtccagaggcttttggaaatcaccgaaggtcagaattcctcaggctgcaagtggagggaggtggatgctccggattccaatacaaattttcactggatacagttatcaaccccgacgacagggtatttgaacagggtggggcaagagtggtggttgactctgatagcttggccttcgtgaaaggggcccaggtggacttcagccaagaactgatccgaagctcatttcaagtgttgaacaatcctcaagcacagcaaggctgctcctgtgggtcatctttctctatcaactttgatgtgatgactggtgaa

SEQ ID NO: 272 - DNA, 517 bp, Homo Sapiens
tttttttcaaataaaccttttatttacaggcaaaggatatagtacaagaagaaaaagagaatacagatgacatcgggggtccaagagacattccatatttaagcttcataatgtccttatttgcacacatataccacactgccttcattttctccagctgatagatttgtgtaagaaatcttgactttgagagttcaatgtcattcccaacagggtctttatgtctgtctggtcatgttatcagccagtcttacttaatgtattaggccagttggaaaccatcattaaagaaactgaccctggtgatcaccagagtagtttcagactataaacaacacatcataaatcccactgcccttatcttggcccaaagacaaaactggacattctgatgaccccagagattatgacagtgttttctggtctaattaaaccatagtcttcatatacctttaccacgcctccttcctccaattaggaagctaagtgggtaagaaagaaaaaataaaggcagagc

SEQ ID NO: 273 - DNA, 669 bp, Homo Sapiens
  misc_feature (516)..(516): n is a, c, g, or t
  misc_feature (646)..(646): n is a, c, g, or t
ttttaaggtgtgaaaaggagaaacttcctatattctttcatagagcttttttctctcctaacaccaggagcacacacacaaaaggatcagcttcatgaaatatataagctctttaagttcacttggagctggattttgatggccaaaattctcttttccttctgacattgacattcatcgttcatccacagcattgatctggtcaaaacgccactgctggcgggcttttccatcacacggacgcaggtacaaatctttattgttttcttgcaccacagcttccatgcatttcccagaaagaatgtggacaatcatcccattctcctggaagtcccagtgctgctggtggatggccaggccttcctccgtgcagttctgaagaatcacctgctcctgcctgacagcaaagcacaggtgctgtgggctgccaaagtgaatctccttcctgctggtgtgctgcaggtactgttgctgccggctgtcactgcaaggagccaacaccatgggacagcccangatgtccccttctgccttgcagtctgcacagagcccaagtccagtgttgtggagctttccagagaaactgggcctgggttcagatggggtacagctagggtagacattagcccagaaccagtggaatgtncgaccacccagtctcccttgcag

SEQ ID NO: 274 - DNA, 511 bp, Homo Sapiens
  misc_feature (41)..(41): n is a, c, g, or t
tttttttttttttttttaaaaatttttattgttttatgtanagacaggcatctgtgttgcccaagctgggcttgagctcctgacattaagcagtcctctcaaagtgctgggattactgtgcctggcctgttttcactaattcaacacagggaatcaccagctgtgatcataagagcctcttgaatcatcagttctacggagactcttagcaggactttagcctttttggggtagtttaagtctgagtaatacgagtgggagagggacaggtgtggtggctcatgcctgtaatcccagcactttaggaggccaaggcgggaggatcacttgagctcagaagttcaagaccagcctggacaacaaagcaagaccctgcctcttttcaagcgtccggcagcagcggccgggcgcgggtccgcagaaaagccgaggcgtttcgggtcccaagctgttccgccgccggccccggcctggcaggcgcgcggagccggaacgcgcctcgtgccgaatt

SEQ ID NO: 275 - DNA, 3088 bp, Homo Sapiens
gctggaagggtttctttggccctgagtgaagagagacccagagggaacactgaggtgcctgcccaaccactctgtcccggtttccttcagcaggaccaggtgagagaagccatgctggtcgttcagatgcctttctcctttcccatggcccacttcatcctctttgtctttacggtttccactatatttcacgttcagcagcggctagcgaagattcaagccatgtgggagttaccggtgcagataccagtgctagcctcaacatcaaaggcactgggacccagccagctcagggggatgtggacgatcaatgcaataggccgcctggggaaccagatgggcgagtacgccacactgtacgccctggccaagatgaacgggcggcccgccttcatcccggcccagatgcacagcaccctggcccccatcttcagaatcaccctgccggtgctgcacagcgccacggccagcaggatcccctggcagaactaccacctgaacgactggatggaggaggaataccgccacttcccgggggagtacgtccgcttcaccggctacccctgctcctggaccttctaccaccacctccgccaggagatcctccaggagttcaccctgcacgaccacgtgcgggaggaggcccagaagttcctgcggggcctgcaggtgaacgggagccggccgggcacctttgtaggggtccatgttcgccgaggggactatgtccatgtcatgccaaaagtgtggaagggggtggtggccgaccggcgatacctacagcaggccctggactggttccgagctcgctacagctccctcatcttcgtggtcaccagtaatggcatggcctggtgtcgggagaacattgacacctcccacggtgatgtggtgtttgctggcgatggcattgagggctcacctgccaaagattttgctctactcacacagtgtaaccacaccatcatgaccattgggacgttcgggatctgggccgcatacctcacgggcggagacaccatctacctggccaattacaccctccccgactcccctttcctcaaaatctttaagccagaggcagccttcctgccggagtggacagggattgccgcagacctgtcccccttactcaagcactaatgctggcccattctttgagaccttttctccttctctgcctccctcaagatgagtgcccgggcatgagaagcacatggttccatgagcaggacccatctctcttctgtgaagatgcgttgggctgcaagtaacagaaatctcagtgaacagtggcctggcgtggtggctcatgcctgtaatgctcgcactttgggaggccagggtgggtggatcacttgaggtcaggagttcaagactagcctggccaacatggtgaaaccccatctcgactaaaaatacaaaaattagccaggcgtggtggtgcacacttgtaatcccagctactcgggaggctgaggcaagagaatcacttgaacccaggaggcggaggttgcagtgagccaagatggtgccgctgcactccagcctgggtgacacagcaagactccatctcaaaaaaaaaaaaagaaaaagaaatgaacgggttcaaagaccataatcatgcatatcacataagaccagaagtggcccaggtccagggtcagttaatttagcagctccacaaagtcatcagtcacctgagctccatccatcttcacatgctgtgctaccatttcttagctgtatcatcccatggtcccaaaagggctgctacacatccagccatcacatgcagataattcctttcaaaaacagcagaaagaggctcgttcttgtcttggtcccttttgaagaatgaatgaaaccttcctaagccttccagcaatttccccccaactccgatgggtaggaattgtcacatacccatgtgacccgataggaggcaaaagaaatgagacttctgggattagtttagcctcagattctgcagctgagaagttgatcagccacctctgaaggacatgcagcttgcagaaaattagggtggtgttaccaaggtgaaaaggggaaatggctttagagtagacaacagagatgccctgaggggttgtgtaggttgttcactgcaggaagtcccctggttaagaaggcaagtggggtttaaacagacccacagtctactcatcaaaccaggtgtccttggcattgtgtccacccagagagctcactgttttcttttctttttcttttctttttttttttttgagatggagtcttgctgcatcccccaggctggagtgcagtggcatgatcttggctcactgcagcctccgcctcccaggttcaggcgattctcctgcctcagcctcccgagtggctgggattgcaggtgcgtgccaccacgcccagctaattttgtacgtttagtggaaatggagtttcaccatgttggtcaggctggtctcaaactcctgacctcatgatccgccttcctcggcctcccaaggtgctgggattacaggtgttagccactgcgcccggccctagagctcactgttttctagttagtccatctggaagtggagcctttttccagtttgcacaaatgtgccatattggcttgtagctggcatgcatccaagtccataggtcctgcctcttcaatcctggctttctagggcctgggatgatcattgctagaactgagagaccagcctggctgagtgaacttcagggcgttccgttcattctttcagtaaatggttgcagcacatgttttacatgtcaggcagtgaaaccccccacagcagccttccctctcagaggatacatttgtaaccattacacagtcatcaaaggaataattttttttaatcaccagtgtgcatacagtcatggagctgggtattcccagctaccagggaggctgaggtgggaggattgcttgatgccaggagttagggaatatagtgcaccgtgattggacttgcgaatagccactgcactgcggcctggacgacgtagtgataccctgactcttataaataaataaatgaataaacacaattatgactttgcggatggg

SEQ ID NO: 276 - DNA, 646 bp, Homo Sapiens
atgataaaattaattacattctctttcacatgcatgaggtgcaaactctgtcacaaagtattttaattaccttttaccttgtttcatagatctttatgtgacataaaaacagtttctggcacggtggctcacgcctgtaatcctagcactttgggaggctgaggcaggtggatcacctgaggtcaggagtttgagaccagcctggccaatatggtgaaaccccatctctacaaaatttgcaaaaagtagatgggtgtggtagtgggcgcctgtaatcccagctactcaggaggttgaggcagagaatcgcttgaacccggggggtggaggttgcagtgagctgagatcgcaccactgcactccagcatgaaagagcgagactcaatctcaaaaaaaaaaaaagtttctggcacctgaacaggaactggtttccatcatcaactcagaaagcactaaaatctaggtggtgattcagggaggagcaggggaagacagcctcctatggtggcatgaataagatgcttccagaactagtagggaaataactaacctcttcaggctttatcaggcctggaggggaaccttgctcatgttagcaagaaaggtatcctagagaagccactcaaaaggcttcctaatccaccct

SEQ ID NO: 277 - DNA, 473 bp, Homo Sapiens
  misc_feature (415)..(415): n is a, c, g, or t
aagagaaaactcctccaaaagcagctctcactatcagaaaacccaactacagttgtgaacgccttcattttctgcctgaggtctcagtccgtcggcccagactgaagtgcagtggcacaatcatagctcgctgcagcctcgaccttccaggcttaaacgattctcccacctcagcctctccgagttgctgggaccacaggtcactgtgcatggcatcatcctggccccctctagagctccaatcctccaaccagagccagctcttccctcaaaatgctacggcctgtgacaatgctccagaagcctgggacctgctgcacagagtgtgccgacatttatcatctccatctgtttcttcggcctcctagggaacctttttgtcctgttggtcttcctcctgccccggcggcaactnaacgtggcagaaatctacctgggccaacctggcaagcctctgatctggtgtttgtctt

SEQ ID NO: 278 - DNA, 477 bp, Homo Sapiens
  misc_feature (157)..(157): n is a, c, g, or t
  misc_feature (380)..(380): n is a, c, g, or t
  misc_feature (390)..(390): n is a, c, g, or t
  misc_feature (411)..(411): n is a, c, g, or t
  misc_feature (416)..(416): n is a, c, g, or t
  misc_feature (429)..(429): n is a, c, g, or t
  misc_feature (455)..(455): n is a, c, g, or t
  misc_feature (470)..(470): n is a, c, g, or t
caaactgaattaaggcatttattaaaaacctgcagctaacatcatacttgatcaggagactaaatgctttctccatcagattagataaaaatattgtcatatcacagggctatccttaagtcaaaatgaaccatccaaataatactcagaaataacngacaaagagtaaagagcaaaaaatgggaatgattcacatgagacaatactctatggtaaactttacatactgataaattgataccaagtccttattagcaaagaaaatggagtcaacattgtatcatgccaaaaagagtagttttccccataataaaggaaagtggaatacatatgatgggtgaggaatatgcagaatctgccacattaacaccagtaaaganatctctattnataaagactcatggggccggntcgcnggtgggctcactncctgtaatctcaggcactttgggganggccaagggtggggntggatcg

SEQ ID NO: 279 - DNA, 633 bp, Homo Sapiens
  misc_feature (11)..(11): n is a, c, g, or t
  misc_feature (84)..(84): n is a, c, g, or t
  misc_feature (517)..(517): n is a, c, g, or t
  misc_feature (539)..(539): n is a, c, g, or t
aattcggcacnaggaatgaaagcagtcatggatcatgaaccaaaggaacttatatgtagaggaaggataaatcacaaatagtgnatactgttagatacagatgatatattttaaaagttcaaaggaagaaaagaatgtgttaaacactgcatgagaggaggaataagtggcatagagctaggctttagaaaagaaaaatattcccgataccatatgattggtgaggtaagtgttattctgagatgagaattagcagaaatagatatatcaatcggagtgattagagtgcagggtttctggaaagcaaggtttggacagagtggtcatcaaaggccagccctgtgacttacactgcattaaattaatttcttagaacatagtccctgatcattatcactttactattccaaaggtgagagaacagattcagatagagtgccagcattgtttcccagtattcctttacaaatcttggggttcattccaggtaaactgaactactgcattgtttctatcntaaaatactttttagatatccnagatgcatctttcaacttctaacattctgtagtttaggagttctcaaccttggcattattgacatgttaggcccaataaattttttttgtgggg

SEQ ID NO: 280 - DNA, 390 bp, Homo Sapiens
atgtctggtcgcggcaaaggcggaaaaggcttggggaagggtggtgctaagcgccatcgtaaggtgctccgggataacatccagggcattacaaaaccggctattcgccgtttggctcggcgcggtggcgtcaagcgcatttccggtcttatctatgaggagactcgaggtgtgcttaaggttttcttagagaacgttattcgagacgccgtcacctatacggagcacgccaagcgcaaaactgtcacagccatggatgtagtatatgccctaaaacgtcaggggcgcactctgtatggcttcggcggctgaatctaagaatacgcggtctcctgagaacttcaaaaaacaaaaacaaaaaaacccaaaggcccttttcagggccgctca

SEQ ID NO: 281 - DNA, 4206 bp, Homo Sapiens
  misc_feature (1667)..(1667): n is a, c, g, or t
gtcgactcgatctcggcccactgcaacctccacctcctgggttcaagcaattctcctgcctcagcctcctgagtagcttggactacaggcacgtaccaccatgcccagctaattttgtatttttagtagagaaggggtttctccatgttggtcaagctggtctcaaactcctgacctcaggtgattcacccacctcagcctcccaaagtgctgggattacaggcatgagccattgcgaccggccatgaaacaatctttacatgaagcatccttatacaaattctgcatgctatcccattccgccttttattttcttcaagtgatgaaaaggaaggatgctcagagagaccagcaaggacatggcaggactgcaagttgcatccagggtccaaaccctcatccctgattccaaattccatcaccacccaccacccagcactgcctgtccagcccatcagttacgctactaattcacagcatcctttgaatcagtggaaagaaaaccctaaaaagttaccaaagaactaaacaaagttatcaattaatttataattaaccgagataatccttgtaaaaataactttcagcggagggtggatggccttaaatttccccacaaaaggtaaaactttcccagacatccctttctgaaaatgagatgtcagtggatgagaaaagcctgctcccaagagtaggtgtgaggtattgcacctaggcccactgctgggataagctggcacagatacacgggacatgatgctttcattctcaccttaaagaaagagacagagaagaaaaggaaggggagcaagtggagaaggaatacaagaaagaggaagagaagcaggaagattctacatacaggctggctgtgtttcccctggggcatgctcctgtttactggtcccatgccaggttgactcattgcctcgttcatgggtggaattaagatgcctacctggggaataaatagagcaaggctgggtgctcacctccacagcggcttccttgatccttgccacccgcgactgaacaccgacagcagcagcctcaccatgaagttgctgatggtcctcatgctggcggccctctcccagcactgctacgcaggtgagttctgtgcagggagggctgcctcggggttaggggttgtcacttgggcctctatggaagaactcctgctccccaattctcagcagagatcagccccagtacaaaggctgtaggtttaacagatctcaccatgttgcccaggctggtcttgaactcctgagctcaggcagtctgtccacctcggcctccaaagtgctgggattataggtgtgagccaccacactgcctagatactgaaatcttctgtgatgctctgaatggtaatagtgaagcatcgtatgattttgaaccaaagaagaccaaataatcttcacgatatacttccaagtccgagtgtttcatttctcaagtcttgtcattaaatgaagtttcatgaggtttagcttttctgggctggggagtggagagaaagaagttgcagggcttacaggaaatcccagagcctgaggttttctcccagatttgagaactctagattatgcatcattatctttgagtctatattctcttgggctgtaagaagatgaggaatgtaataggtctgcccaagcctntcatgccttctgtaggaagcttgtttccttgtgcatccttcccaggctctggctgccccttattggagaatgtgatttccaagacaatcaatccacaagtgtctaagactgaatacaaagaacttcttcaagagttcatagacgacaatgccactacaaatgccatagatgaattgaaggaatgttttcttaaccaaacggatgaaactctgagcaatgttgaggtgtttatggtaatttcattttcttcctataagctttttaaatcccctgaccagggacaagtgggctcttcatttctcactgacaatgccaaagccactagtgaacaagccttttcttacattggttaatttagttgaatggttagtctaatgacgtttgccatcaagaaaaacatccagtgtccctgtgttgtcactctacccagagaatcctcagtggatgataaatgaatagggcaagagaggaaaaggaaaggtcggtagaagtcttacctatccccagagctctctaattcatgctcacaaacacagacacaatcacacaaacacagaaacacacatacacacatccagacacatgcaaacacacagacacagtcacaatcacacaaacacacacacattagacatacacaaacatagacagacaggcaaagacacagacacagacacagacacaatcacaccagcacacaatcatccagacacaaacacaaacacacagacagaaccacacaaccacagaaacacagagacacacacaaacacactcagacacacacatacaaacatatgttcactctctacagaaaaaacaattttccagaagacccgcacctatagaccaatctgcagagaaaacttctcttcttcaaaaaaaagtaaaagtgttctttcttaaaaaatgccctatttttcaacagtttggaaaataccatttgagcaagattctatacatctcaaataaaaagaatttaaaatgcacttccaggcaatcataatttgctagcataaatgatgagaaaccttggactatccaataggcaactgtagatcatgggtatgaaaccaccatggaggaagaattgcctcaaacaaaaaccaatagttttgtatttctttctaactatacatgtatattgttgagggttttctttagcatttattccctatgttaaattcttctttaatcgttccctggtaaaaaaaaaaaaaaaaaaaaagttagaaatataccaaacccctccattaggatgaaagtgaacatcacctcaggaaaccctgacgctttctacaacatggatgaaccttgaggatattatagcgagtgaagagtgaagcaaagagtcacaaaaacacaaatgctgcatgacccatgcatatgggaatctggggagccagactcagagacagtgaaaaaaaaaaaaacagtggttgtcagggcttgggtgcagagaagaagggggagtcatatttaatgggtctggagtttcagttgtgcaaaacagtaatattctggagttaggttgcacaaccacacgaatatacagaacactccgaactgtccccttaaaatggcaaattttatgagatgtacattttaccactattaataatttgttaaaaactaattatcaactgcagggaagggtgatggatttgtttcttttaaaacttcctcagacagatcatagtctgcagctccaataattagtagagcacaatggtggtggcagagggcgtcggactgctgggatgctgggaatatttccacaatggagggttagacgagagctcaaagtttcacttttttttttttttttttttttgcatttgagctaagattttaacaatcctgtgaaaataggtaatatagtcacgtatttgttgaatacattatttcaaagaaccacaaacacacagaaaaaatatttaaaaagtccatggtgggggaaatgatccagaaacaacagctcttctacttccagccctaaccgtctgggatgctagatggttgtgggcaaaccgtggaaaaagataagcttctgtttttcaagattttattttgttagagagtgcagaaaatctaagtgatgtctctgtttttgctttctagcaattaatatatgacagcagtctttgtgatttattttaactttctgcaagacctttggctcacagaactgcagggtatggtgagaaaccaactacggattgctgcaaaccacaccttctctttcttatgtctttttactacaaactacaagacaattgttgaaacctgctatacatgtttattttaataaattgatggcaaaaactgaagtttctctttgttctaccgtagaaaagaggcgttagagggcctcacatattttacatacacacacacacacacacttacttattaaagaactcatggtcatgggttgaggactctgtgaagcatttgtttcctcagtctgacctctaagccttggtactctctctgaagagtgtttccctgtccccatcccaccacctcccccgtcgac

SEQ ID NO: 282 - DNA, 371 bp, Homo Sapiens
tttttttttttcaaagagggagattgatttctttttatggccatcttaacaaaaatacttcggaaggcaatctttgattccagcatcggaggccgggcaattccaggcaataattaagccatcaggctgttggacaggaaagtgttcagtttgagggaagcaggaacccccaaagaaccacagaatggggagatggagccaaaggcacagggacattgcagtcaccttccattctccctacgtgggacaaagcttggcttgggtttacaagcagcgctccaggaacagccttggaaggcactagatgctgcaatcctcccagctcccactatggctgggggcaggatgggagggtggggggttgttggctg

SEQ ID NO: 283 - DNA, 4064 bp, Homo Sapiens
cttcaaagggttgagtctgggggctcatcagaagaggtaatcccaagtgacttggaatctgcaacaggtgggttaggacctcatccttagatattgctttaaccaatttatgggtaagccatagttctgagcagagtcacgtgctcacgcgccccacgtgtagtgacaacgggaatgtaggcttaaacataggtaacagcttcaaaagagtttgtaaaaacaaggctgtgaatatcaatataattgtgagacttttggggatttattgtaggtttgaacgtaacttgaaatacagtgatttgtagacagtcagtaattgcttcacttgctccatttggaattttgtaactattcacttctccagcagcataaggtggttaagaagacagtttctgttcgttgtaaaaaattactccaggcttaaggaggacaattattgtgtctttatattcatatacccaggatttagcacagtgcctaatccataagggccacactaaaatgtttgcccagtgaataaatcctggataatatcatcctgtctgcaaagccagtattacagagtgattggttgccagtaggggagatagctccctttggttacacaaattgtggcagacattgaaccactccaaaagaaactaaagctatttatttggggattgaaacaaaaaagcctacacaacttgaaaaaagcataaagacactcagatggaaccatagtgtctcccagcagatatcaccagatgggggtgggggtaaataattgcagtcacatatgcagcaggtatatatatttttactaatggcttattcttaaacaggacttgaggccagagaaatttcaaggataaattgctttgggagaatgcctgatatcaatgtctcctgagacatagaagttttccaaaataacaaatcaccagatatattattttgttgcctcctcttccttcccctggcccctgccaatatgcttatttacaagagttaccttatcagttgtcttaggagaacacatttccttcaacagaagtcacagtatcatcttatggtcataattttacaatatccctgcctctactgagaagagatacatagcgaatggagatgtgctgagccaatgaggaattaatcctaggcagcactagtagatgtggccacagctctggccccaccccactctggtggtcaggccaaaaaagaagtcaggtaagaagtgtgaaaggaaattcaatcttgggacccccaaactcattaagccacagggaaaattcaagctgggaactgggtcacgcaaacatgcctcccccttttggttcctaaataagatggctacaagatgaaaagctacatgcctcccccatattttgcccacaagggaattcccagtgagctgctagatctttacactaaaggtgtttctattaaaatttcaccatggcaatataaattgatagtttatagatgcagtcacccctggcccaccagacacaaatgcatatctgattgttcccctggcccagttttgtctgttatcttatataaaatgcagattccctgcaattttcctctgcctcatttgtctgtgtcatcttatgttaaaaaaaaatgcagattcactgagccagacaaaggcatgaatgactatttttccctacccacctcttacatgaaaattgtgtacttctcaatatcctgccctttcccctttaaatttggagccttcaaaatcatctttggggaaaggcatagacctgtctcctaggtgtgcatccttaactttggcaaataaacctcctaaaataattgagacttgtcatttttctcgattgacagaagaaaagacagagccaagaggatggcagtgtacttggctacccccagagcctagctgaggctccagccctgggcacttcactggagcattcccttgccagcagaggaacctgcagcctaacctcatgctggggtaaccttaatgtgggcaatccgtcttactgtaatagacaaattgcctgctttcacttaatccacagatttacaagggacaaactttggccctaggaatatttattgaatatcatttcatccttgtgacttccacttctttctgattcccatatcaccagcccaagagaacttgagtatctgttcacagctttgctcctctttccccacattaaccacaaagcaacggaaatagaataaagagacaaatgggtaactctaagtaggttcatcacattcattacatgccctgtatccagagccaatataaatggtcttgattctgattgtgttgaggtataaaaacatgctgatttctgtggcaggtattaatgattattacttgtgtattcatttgctcactgctccattctggatgttcttggtctcagggcctaaggatcattttctcggatgcatcacggctcatcttccggctcagttcctccagtggtgtgcgggccaccctcagactgtacgcagagagctacgagagggatcccagcggccatgaccaggagccacaggcagtgctgagccctctcatagccatcgcactgaaaatatcccagattcatgagagaactggccggaggggacccactgtcatcacctgaatagaggaaagatcactcaccagggccaaagagagtgctcagcgggagatgcttcactgatgccttcttgctacctgtttgtgcctcttatgactttggaaaaacaaaagatattttgcttttgggggatagagggtgggtgggaaaagaaaaaaaatccatttggttttggttttgtcctattcctccaaatgcagcagggcctttagttgtctgttaaagctgcactataatttggtatctacattttatcacacaaaggaacctccccttttgacaacaactgggctaggcagctgttaatcacaacatttgtgcatcacttgtgccaagtgagaaaatgttctaaaatcacaagagagaacagtgccagaatgaaactgaccctaagtcccaggtgcccctgggcaggcagaaggagacactcccagcatggaggagggtttatcttttcatcctaggtcaggtctacaatgggggaaggttttattatagaactcccaacagcccacctcactcctgccacccacccgatggccctgcctcccccatcccatccccaacatccctgtaccaccttctctcacatcttctaaagctttgtacaaatcacaatggtgcacttccaacaaaatatatcaataggtgttttcctctcttattttgtaaatagtattattttagctattaagctggataccttctttcaaattcagccattcagttgtaaagttgggaagaagtttcttgacaagactctgcaattaaatgcttaaaatttggaggggatccttccttgattacatcaagtatgttggtacatgggtttatacaagttcctcttgagaaggcaaaaagaccaccatgtgtgagagctctttgacttggccaataggggcctatcttaatgcacttgtttggacacatttctgatcttatttgtaaaggctgcaaaaggagaggatgaaatgctgtaaaagtaggaaatgaagtggaagctggaagaaaatgtaattggtggtacagctatgggccagatggtggaggggagggtggggacccctgccggcaagcagagtgtcacagctggctttcctcacttgggaaaagggtactgccggtctagcagcctcctctgtactcagccaggacacccagcgcgtgggacctgtttgtgtctgttttgcttccttgggaacggcacagtcactcaccctgccatttgcggaaatgacctggtgcactttgactgttaagcaatgcgttattgctgtagtcaaggttagtgcaagcaaggaaacattcccagtaaggtatttgtttccattttctgtctgtgcttctgtcagaaacttgctaggactttagtggccaataaaaaagaaattcctaatttcaaccttaaaaaaaaaaaaaaaaaaaaaaaaaaaaaaaaaa

SEQ ID NO: 284 - DNA, 1538 bp, Homo Sapiens
ggaagcgcagcgggggcgggaaggttgtagtgccgcgagttgagctcctcttgcctaagtggtcgcgccccctttaagagcagcgattgtaaggagaggcggtcccggtgtcctcgggtcccaggtgattgtgaagtgctgaccaattgccactggacatacttgaaacaaaataggaaaatggcagcaaactcttcaggacaaggttttcaaaacaaaaatagagttgcaatcttggcagaactggacaaagagaaaagaaaactacttatgcagaaccagtcttcaacaaatcatcctggagctagcattgcactctcgagaccctctcttaataaggacttccgggatcacgctgagcagcagcatattgcagcccaacagaaggcagctttgcagcatgctcatgcacattcatctggatacttcatcactcaagactctgcatttgggaaccttattcttcctgttttacctcgccttgacccagaatgaagaaaacatttgcgatggaaaagtgactttgtaatatcaaatgccaaagctactatcattcagtgctacatgaactgtgactttaagaattttggtgaactttgatattttttgtttgtctgaaagaaaggaatgtgtaagtgaaagctgaaagaagaataaccaggatgatgagagctgtggaagctgtatcgtccaaggaattgattatgtaccgtgactgtaacttttttgtaatgctgtttaactctcaatcagactgtgaactggatggtcacgaagtcattccccaactcctagcaagtttgactgaatatatcatgtccacagtagattttcaagaatcatttatagtacttaactttaaagaaacaaggctgcttttaaaaaatgaactaataggcttaaatcaattgcatccatatttgctgtttataggattgctatcagtataccttttgcgtttatagtcaacatgtatcatcctgaaatattctttctggacttataactacttccccctttttcactttaaaacaaacctcaagaataaattactaaccagtcttaaccatcttttataaacatatgctcttataaatgttgtgactagatgcaattaaaaataatagggaatgtggtaggtttttaatttgtacatcctcttatttagtgttaccacataaatgatgagtttgtgtggttctgttttccatttttgttctaactgaaaactttttggctgggcacggtgcctcatgcctgtgatcccagcactttgggaggccaaggcgggcagatcacttgagatcaggagtttgagaccagcctggccaacatggtgaaaccctgtctctactaaaagtataaaagattagccatgtgtggtggcacacgcctgtagtcccagctactcgggaggctgaggcaggagaatcgcttgaacctgggaggcaggggttgcagtgagctgagacggtgtcactgcactccagcctgggtgacagtgagtctttgtctcaaagaaaaaaaaaaaaaaaaaa

SEQ ID NO: 285 - DNA, 381 bp, Homo Sapiens
  misc_feature (372)..(372): n is a, c, g, or t
  misc_feature (378)..(378): n is a, c, g, or t
ccttagatattctacaatttattcttcatgtacacagatgcaaaattcagtttaaaaaatctataaagaactgaaacaacatgatccacagccttgtttttacagcctttagttttcaaaggaaccgctttcactcagctgtactttggcgtctcatcatctgtctacaaggagtaacatttaaaaactactgagtgaaattagacctaaacccaatataggaatgtcaaggggtttctcccctatatcacagccttctcatattctaaggattccatagagaagttccttttagagctcaaactcagaaagagttttctcaaacaggtcatttgtttttattttaatggatacaccaaaattttataatgnggttgngtt

SEQ ID NO: 286 - DNA, 648 bp, Homo Sapiens
  misc_feature (405)..(405): n is a, c, g, or t
cagcagaggggaaattgtggtcattggtgctacgaacaggctagattctatagatcctgctttacgaaggcctggtcgctttgatagagaattcctctttagcctgcctgataaagaggctcgaaaagagattctaaagattcacaccagggattggaatcccaaaccactggacacatttttagaagagctagcagaaaactgtgttggatactgtggagcagatattaaatcaatatgtgctgaagctgctttatgtgctttacgacgacgctacccacagatctataccactagtgagaaactgcagttggatctctcttcaattaatatctcagctaaggatttcgaggtagctatgcaaaagatgataccagcctcccaaagagctgtgacatcacctgngcaggcactgtccaccgttgtgaaaccactcctgcaaaacactgttgacaagattttagaagccctgcagagagtatttccacatgcagaattcagaacaaataaaacatttgactcagatatttcttggcctctgttagaagtgacttggctacaatgatgatgatgttccatcagtttatgaaaatgggacttcctcagaaatcttctcataaggcaaaagaccaatttaatttttttcaa

SEQ ID NO: 287 - DNA, 493 bp, Homo Sapiens
ttttttttttttttttttatttatcccccaccacgctgcccaaaaaaaagacagggtctccctatgttgcccaggctggtctttaactcctgggctaaagggatcctcctgcctcggcctcccagagtgctaggattacaggtatgagccaccatgcccggccctaggttaacttcttaaaacaatgaaggaatcacagtgttaacattgtttgtaaggtgtagtatttgtcaggcaactgaaacaatcagacttccaaatgaagtcatttgcaggctgtgaccaacttttccctgaattcaaattgacaaaactactttgtagagatgcaagagtcttgcctcacttccaggaatgatgtatggattcatgcgccagaaaggaaaaacaatagtcaagtcagactaaaatgagagggagaacacaagcccgaattttgctcacatccccagaagcaggagtaagcttgcacttttaacaaatgcctcttacc

SEQ ID NO: 288 - DNA, 455 bp, Homo Sapiens
tttttttttgagggatgcacaagtctttattcctgctggcagaggaggtggtcctgtggctggcggagtgggcacctcaggctggcagctctcacctcttgctggccggcagcttcagccacttgggcaccttgcccaggctcctcttcacgggctgggccgtccctgggatgggctcaggggggaccagcgccccctcctcagcagctggctcagacttaggtgcagggtcaggggctggcaatggggaaggggacccggcggccctggacatgtacctggccaccagcacgtcggccacagatggggagatggcatgctccagcaggccaggctccaggtagacacctgccggctcctcggctcccaagtgcaccagagcggccgggaagaggttcgcctgaaagagggtctgcgtgtggtcgtcaggactgtttttggagggtgatgacagg

SEQ ID NO: 289 - DNA, 431 bp, Homo Sapiens
  misc_feature (368)..(368): n is a, c, g, or t
  misc_feature (387)..(387): n is a, c, g, or t
cgacatttctgcatatggtctgctaatggcaccgatgcttcacattccaggaaatggttacttagggaaggttgatatgtgctgcagcataataggaacttaattcaaaccagagcaaccagaaaggatactggaggcaaaagccaaaatacaatttaaaatcttaaaaaaaataaggaacggtttaaaggtaattaatgaacttttcctcacctagtgtaaacatttcatatgaagtaatattttgtggtcacaaaaaaagcacagatacctcttttagaatattcatgatgctcttgtgtatggaacttaagttttcatggaaatgctttccacctcaaaaccccgtatttcaaggattcaaggangggcccaggcacgatggcntcatgttctattagtcccttcacgttgggagggccgaggccgtt

SEQ ID NO: 290 - DNA, 281 bp, Homo Sapiens
ttttttttttttttttttttttttttttttttttgcaaaaagtaaaggtcaaatttatttaatacaacatccacgagggtccctgcagctgtgtcactgaggcaaacaggaaaagtgattttggctaggcgtggttctcatttgtgaaattccacagcgcaatgacagcaacctttttcccacccactcaagacactgtcaggaatgtcttaagacctcaggagaccacttttttagcaagcaattttgttttttgtctttttttgaaaaggattctcact

SEQ ID NO: 291 - DNA, 1335 bp, Homo Sapiens
ggagagtgcggggggcggaggctggcagggggcgctggaagctggagcggtccgtgcgctccccgcgcccgagggtgcaggaggctctgaagcggctgctgcaccgcggggcccaggcggcggctggggggctggggggcgctgccgccgccgccgccgggggcgtcgctggcctcggcccctttgttctcgcgcgctccccctcgccgcccactcccctgctgtcgcgcggcggcggcggtggcggcggcggctcctcccgcccgaggcagtcgggctcggcgccgggggcgggagggggcggggggagcacgccagccgccgagagtggggggcgatggcgaagctccgggtggcttacgagtacacggaagccgaggacaagagcatccggctcggcttgtttctcatcatctccggcgtcgtgtcgctcttcatcttcggcttctgctggctgagtcccgcgctgcaggatctgcaagccacggaggccaattgcacggtgctgtcggtgcagcagatcggcgaggtgttcgagtgcaccttcacctgtggcgccgactgcaggggcacctcgcagtacccctgcgtccaggtctacgtgaacaactctgagtccaactctagggcgctgctgcacagcgacgagcaccagctcctgaccaaccccaagtgctcctatatccctccctgtaagagagaaaatcagaagaatttggaaagtgtcatgaattggcaacagtactggaaagatgagattggttcccagccatttacttgctattttaatcaacatcaaagaccagatgatgtgcttctgcatcgcactcatgatgagattgtcctcctgcattgcttcctctggcccctggtgacatttgtggtgggcgttctcattgtggtcctgaccatctgtgccaagagcttggcgatcaaggcggaagccatgaagaagcgcaagttctcttaaaggggaaggaggcttgtagaaagcaaagtacagaagctgtactcatcggcacgcgtccacctgcggaacctgtgtttcctggcgcaggagatggacagggccacgacagggctctgagaggctcatccctcagtggcaacagaaacaggcacaactggaagacttggaacctcaaagcttgtattccatctgctgtagcaatggctaaagggtcaagatcttagctgtatggagtaactatttcagaaaaccctataagaagttcattttctttcaaaagtaacagtatattatttgtacagtgtagtatacaaaccattatgatttatgctacttaaaaatattaaaatagagtggtctgtgtt

SEQ ID NO: 292 - DNA, 643 bp, Homo Sapiens
  misc_feature (584)..(584): n is a, c, g, or t
gcagatgcgcgtggtgcggctgctgcggctccgggcggctctgacgctgctcggggaggtcccccgccgcccggcctcccggggtgtcccgggctcgcgcaggacgcagaagggcagtggagccaggtgggagaaggagaagcacgaagacggggtgaagtggagacagctggagcacaagggcccgtacttcgcacccccatacgagccccttcccgacggagtgcgtttcttctatgaaggaaggcctgtgagattgagcgtggcagcggaggaggtcgccactttttatgggaggatgttagatcatgaatacacaacaaaggaggttttccggaagaacttcttcaatgactggcgaaaggaaatggcggtggaagagagggaagtcatcaagagcctggacaagtgtgacttcacggagatccacagatactttgtggacaaggccgcagcccggaaagtcctgagcagggaggagaagcagaagctaaaagaagaggcagaaaaacttcagcaagagttcggctactgtattttagatggtcaccaagaaaaaaataggcacttcaagattgagccgnctggcttgttccgtggccgtggcgaccatcccaagatggggatgctgaagagatgatca

SEQ ID NO: 293 - DNA, 633 bp, Homo Sapiens
tggccccccaccctgtttggcggtgagtttccgcaccaccggcctcagaagtgtccctcttgcttcgtctcttgttcgcttgctttgtaaatactttggtcccaagctgagacaattgctgtgtaaaacgtgaagagtcaatcccaaagggtgttatttgtcagaagaacttgccgtgtgccttcaccgaaggcagtcaagtctgcagttggatttttctcactggtgaatgacaagaaacagggataattttgcactgcggagatattacgggagttgtctatatgattatatatagtacctgattctttgaacatattattgaactccaaaatgaattcgacctccattcaggcttcctgaaatctctgaagttgctgaaatttgtatattattttccttttccaatgcaagatctgctggtgacgggaaatgactgtctggttttattatggtttataaattaataaatgggctatttaattctgtaaaaaaaaaatacttaaacaaaaacactaaccccttacatattataaaataatatttaattttttaccctcccacatccaaaataatttttttttccttggggggggcccgggcccatttcgcccttttttgagttttttcccc

SEQ ID NO: 294 - DNA, 414 bp, Homo Sapiens
tattattggaacaattcaagtcattttatttgttttctcttttaaagatatagacaggcattgctccgagccaggatcaaatgtggagaagcagtggctgttctgacaggtggcggtcttgtctcgatgtgagcggagtccaacagacgctgacatctccggtgaatggcttcaatgataattttaaaaaatcatggtggctgctttatggataatatacaattttgcaagcctcaaacggaaggtctacaatggcataattaactgaactgaactgcaaattggatgcacaaaaatcctacgggtttccccttagaaaggaagaatatgaccttattccaagaccaagatcttattcatagtatgtattggcaatttagctgtcaggtttaacattattatcatgaaaagagg

SEQ ID NO: 295 - DNA, 564 bp, Homo Sapiens
  misc_feature (19)..(19): n is a, c, g, or t
  misc_feature (25)..(25): n is a, c, g, or t
  misc_feature (43)..(43): n is a, c, g, or t
ccgcggcgagcaggcggantgcggngtcgggacgctctggtgngggcggggcgcaagggaggtttcgagcccggaaggtccggcgcccagagctaacgggagtcccaggttaaacactttaagatgagaaaaattgatctctgtctgagctctgaagggtccgaagtgattttagctacatcaagtgatgaaaaacacccacctgaaaatatcattgatgggaatccagaaacgttttggaccaccacaggaatgtttccccaggaattcattatttgtttccacaaacatgtaaggattgaaaggcttgtaatccaaagttactttgtacagaccttgaagattgaaaaaagcacgtctaaagagccagttgattttgagcaatggattgaaaaagatttggtacacacagaggggcagcttcaaaatgaagaaattgtggcacatgatggctccgctacttacttgagattcattattgtatcagcctttgatcattttgcatctgtgcatagcgtttctgcagaaggaacagtagtctcaaatctttcctcataatgatac

SEQ ID NO: 296 - DNA, 2797 bp, Homo Sapiens
acccacgcgtctggccgcgggccgcctctgcggcagcgctagtcgccttctccgaatcggctccgcacagctaggagaaaagatgttcactgtgctgacccgccaaccatgtgagcaagcaggcctcaaggccctctaccgaactccaaccatcattgccttggtggtcttgcttgtgagtattgtggtacttgtgagtatcactgtcatccagatccacaagcaagaggtcctccctccaggactgaagtatggtattgtgctggatgccgggtcttcaagaaccacagtctacgtgtatcaatggccagcagaaaaagagaataataccggagtggtcagtcaaaccttcaaatgtagtgtgaaaggctctggaatctccagctatggaaataacccccaagatgtccccagagcctttgaggagtgtatgcaaaaagtcaaggggcaggttccatcccacctccacggatccacccccattcacctgggagccacggctgggatgcgcttgctgaggttgcaaaatgaaacagcagctaatgaagtccttgaaagcatccaaagctacttcaagtcccagccctttgactttaggggtgctcaaatcatttctgggcaagaagaaggggtatatggatggattacagccaactatttaatgggaaatttcctggagaagaacctgtggcacatgtgggtgcacccgcatggagtggaaaccacgggtgccctggacttaggtggtgcctccacccaaatatccttcgtggcaggagagaagatggatctgaacaccagcgacatcatgcaggtgtccctgtatggctacgtatacacgctctacacacacagcttccagtgctatggccggaatgaggctgagaagaagtttctggcaatgctcctgcagaattctcctaccaaaaaccatctcaccaatccctgttaccctcgggattatagcatcagcttcaccatgggccatgtatttgatagcctgtgcactgtggaccagaggccagaaagttataaccccaatgatgtcatcacttttgaaggaactggggacccatctctgtgtaaggagaaggtggcttccatatttgacttcaaagcttgccatgatcaagaaacctgttcttttgatggggtttatcagccaaagattaaagggccatttgtggcttttgcaggattctactacacagccagtgctttaaatctttcaggtagcttttccctggacaccttcaactccagcacctggaatttctgctcacagaattggagtcagctcccactgctgctccccaaatttgatgaggtatatgcccgctcttactgcttctcagccaactacatctaccacttgtttgtgaacggttacaaattcacagaggagacttggccccaaatacactttgaaaaagaagtggggaatagcagcatagcctggtctcttggctacatgctcagcctgaccaaccagatcccagctgaaagccctctgatccgtctgcccatagaaccacctgtctttgtgggcaccctcgctttcttcacagtggcagccttgctgtgtctggcatttcttgcatacctgtgttcagcaaccagaagaaagaggcactccgagcatgcctttgaccatgcagtggattctgactgagccttcaaagcagctcctggagtccaatggctgcttagagtcagcctgggtggcaccaggcaatgcaggtgaagtggctgccttcaggaaatacaactaactaaaatcaaacacctaggtcacgtgcctctcaaatactgatttctgccacagcacctcttgaggcatcccttggctattctgtgcatattgttcttcagagacctcactacccacatgctgatctattggggaacagagaagagacaggccactaaggtcaggctctttatattaagttccccagaggaagagtaagttgagaaggtatcagtttaatgttgaagaattgacctcagggctcagtttccatttccctccctcagtattcttcctggcaagatacccattaagcatttcgccaatcagaatctcattttatagtttttcccattggtctttaactaagactttcttgtagcaatctcgtaagcagtgaaccccctcagatcagtagaatatagtatctgggggagaagacttacttccttcagggcagcagccacagccaggcttctgtcatacaggtagatcccgaagcacagagacataaaaaaggtctcccagaaaactatagaccattctccaagtggaattcccacttagggctctggtcactagattgcaacctgtgtgtttgtcatcatcctcatctcaccattgtattgctatgccctcccataaaaacacattgatccctagcaagattattgcattccagattttactgcctttgctaggcttttgcttagcaaagggctgactttccattgttatcatggtgtatatatttttgtcaccattcccacaagtatacttgatgttgtcatagaacgaacatcctactctatgatttactaaccaattactttcccagatcatagacctctctgcatagtagtcataggtcttgactttggggaaagaaaaggaagctgcaggaatatttatctccaaagtcgaatgagaaagaactccagcaaatccaatggctacaaactaaaaatcagcattatttcatattgctgtttcttagctgaatatggaataaagaactattattttattttgaaaaaaaaaaaaaaa

SEQ ID NO: 297 - DNA, 440 bp, Homo Sapiens
  misc_feature (126)..(127): n is a, c, g, or t
  misc_feature (138)..(139): n is a, c, g, or t
agcggccgcgtcggggccgtgccatgcggcagctctggcgcttgatgtggcggtgcaggtggtcagagcgcgtgaagctcttgtagcagaactcgcactggtagggccgcacgcccgtgtggatgnncgcatgtggtnntcttgagggtcgtagttgtgcacgaacttggcgttgcagtggatgcacaggtagggccgctcccctgtgtgcttccgcatgtggattttcagcttgtcctgcctggtgaagcggacctcgcaaatggtgcacatgtatggcttctcccccgtatgggttcttatgtgccgcggaagctttccggcccccataagaactttgtgggaaaatggggcacttgttgaaagggccttgggctttaagtttggctttttttcccagggccccgggtgggaaagaggcctcccaggggggtgggccc

SEQ ID NO: 298 - DNA, 238 bp, Homo Sapiens
  misc_feature (165)..(165): n is a, c, g, or t
  misc_feature (188)..(188): n is a, c, g, or t
  misc_feature (194)..(194): n is a, c, g, or t
ccaaagacaaaccacacaagctgtaacttgcagataaaaacttatatggaatttcaaattgcatgaagtttaaaacttcatgaagtttcacattaaggagcggaggcttctctctctcgtctcatagaaacaaatcctgaaaatactcatcaaattcttcttccngtgatttttcatctgtctctggnagtggncccttccaaagttcaggattctgaaggcactttcttccctcatc

SEQ ID NO: 299 - DNA, 367 bp, Homo Sapiens
ataagggcacctttgccacctacagctgacaagacacactgcaatattattcataataagcttggaaatgtcaagaaaatttaaaaagaaatgctcactttgtgggtagtcccaatgattctaaacactgaatactaattcatcattattagtattcaacacggttgctcttccttttgaaagagaacagtagcatgcattgtcagttttttaatccacttatttaagcaattttaatctgcaaaactattttaaagaaaaattgtcctaaacagtgagcaaaagaaaacacaatagtgagaatttaacacaatcacaagtcctgtgaagtaaatgttaaaacttcttacatacttcggacgcgtgg

SEQ ID NO: 300 - DNA, 1581 bp, Homo Sapiens
ataactaaattacattttcttggtcttttgactatgaaatagtttaccctagcaacatgaaaaacaagagacctaagctattagaagaaatgcagttctatgtatcttgtgtgtatagtttttccctgggtggttttcaacgaccagtgactccttagctggtttcctcagctgctagcacttgctctgggtacttgtcctcaacacgtccatctgcaacaatgtgtgcctaggaaataaactcaacttactactcacccaaccaaaatgtaattttttaaacgcagcacacactgggtggattccaaagtcatgattatgctttactatgcactctgtactattcagaccactactctcattcattactgcaattaactgcacacataactattttttattgctaattatacaccactgatttccactttaaaaaaacattagcatttgtctctaattaaatatttactgcttgtgttttacagacccgatatcaggttcttctttagactgggcttatgacctgggcatcaaacacacatttgcctttgagctccgagataaaggcaaatttggttttctccttccagaatcccggataaagccaacgtgcagagagaccatgctagctgtcaaatttattgccaagtatatcctcaagcatacttcctaaagaactgccctctgtttggaataagccaattaatccttttttgtgcctttcatcagaaagtcaatcttcagttatccccaaatgcagcttctatttcacctgaatccttctcttgctcatttaagtcccatgttactgctgtttgcttttacttactttcagtagcaccataacgaagtagctttaagtgaaaccttttaactacctttctttgctccaagtgaagtttggacccagcagaaagcattattttgaaaggtgatatacagtggggcacagaaaacaaatgaaaaccctcagtttctcacagattttcaccatgtggcttcatcaatttatgtgctaatacaataaaataaaatgcacttaatgctttaaaattcatctttttatgataaacaatattctctgtatttctctatagcattaataatcaatattaatgccattcattcagtctgttaataagaaataatatcttcaattttcaaaaacataatttgcctatctttttctgatagaagtagacattgtttatatcttcaaaaaagcaaaaggatgtcctagcaggaaataaagtggttcatatagagatgaatctcagtcctttaaataaccgatccagttctcatcagcataatgtacattaaattcaaaatagtttaatttaacctgccataatcagaagaaaccacctgctaaaacatctgtttgccggtacagacacagacaagacagtctggtcagctgtgacccctgccctcctaatggatagaaaggaaacctggaaacatactgtaagttgaggacggaaagtcatgttgaccaaaggcaatcagggtaacttgctgcatttgtaccatttatactcctattatttaagatagtattattggatagcttctccc

SEQ ID NO: 301 - DNA, 1056 bp, Homo Sapiens
ctttatcttctctatgcacaggcttaaacttgactgttgtatgttagcatattttctatgcagcagttggtcaacttcaactcaaaacactgttttcttatgtttgttacaaacttaattttttgaaagtactctgtagcatgacaatttttagagctgcaggttagctattatagctcaagcttttttgtttgtttttttcttcactttcttcacatctgaggtttctttctctaatccactgaaattattgtgtgctaaatttgggaaacagatctattctaactcattaacccagttgaaatttaggtctgtcatcttaatatatcatgcagtaaaaggaagaatctttttaaagtgacccacctttcatgctgctccagcattgtcctgcttgtgctgatggtgtgattaggtgtagagaatttgcttaaatttaacttcaaagttcatcacacagcttaatgagtcacattgaaatactcagtaattgaactgcaaatcacttttagttacaaaaagagctaaagcatgtcagtggcatgatgcttgccaagccagatctaggcatctaggataattaaggtattttagtatgcaatttactgccataatatcaaaggtcagtaacagtgttctttctttcttcaagcttatgtatacctttaaagataacttgcatgaattactttgattactttggtctcaattatttgtcaccccagttaaacatgaaaggttgcagtgcttcctgttcccttactggaagttagctttttcttttctctttcttcctttctttctctcactctttctttctctttctctttctctctctctctctctctcactcactcactcacagatttgctaatgccacagaaagggctctcttaacttaagataagtgaaaagtactaaaaaagattcaggtaattatcattcagcactttattgtaattcagaataaaatttatgatggcatatttgccctgcaaatgtcttaatgaagttgttctcaataaaaagctccttattgatttgagaaaaaaaaaa

SEQ ID NO: 302 - DNA, 6765 bp, Homo Sapiens
cgccacccccgggctcgggtggccccgcttcagtcccagggcagggatccttccatgaagactgaggcaggcggagctgctaagagcctgctgacatgacatcggccacagagtttgaaaatgtgggcaaccagccaccttacagcaggatcaatgcccgctgggacgccccagacgacgagctggataatgacaatagctcagccaggctctttgagaggtcccggataaaggccttggcagatgagcgggaagttgttcagaaaaagaccttcacgaaatgggtgaactcgcacctggctcgagtgtcctgccgcatcaccgatctctacaaggacctgcgggatgggcgcatgctcatcaagctgctggaggtgctctctggagagatgctgccaaagcccaccaaggggaagatgcgcatccactgcctggagaatgtggacaaggctctccagttcctcaaggagcagcgtgtacacctggagaacatgggctcccatgacattgtagatggcaaccaccgcctggtcctgggcctcatctggaccatcatcctccgcttccagattcaggacattgtggtccaaactcaggaaggtcgtgaaacacgctcagccaaggatgcgttgctgttgtggtgtcagatgaagacggcaggctaccctcatgttaatgtcaccaactttacctccagctggaaggatggcttggcctttaatgccctgatacacaagcaccggcccgacctgatcgactttgataagctgaaggactccaatgcccggcacaacctggagcacgcattcaatgtggctgagcgccagctgggcatcatcccgctcctcgaccccgaagatgtctttacggaaaaccctgatgagaaatccatcatcacctatgtggtggccttttaccactacttctccaagatgaaggtgctggcagtggagggcaagcgtgtcggcaaggttattgaccatgccattgagactgagaagatgattgaaaagtacagcgggctagcctcggacctgctcacctggatcgagcagaccatcactgtcctgaacagccgcaagtttgccaactcgctgacgggcgtccagcagcagctgcaggccttcagcacctaccgcaccgtggagaagccgcccaagtttcaagagaaggggaatctggaagttctactttttaccatccagtcccggatgagagccaacaatcagaaagtgtacacaccccacgatgggaaactagtgtctgacatcaacagggcctgggaaagcctggaggaagctgggtatcggcgggagctggccctgagaaatgagctcattcggcaggagaagctagagcaactagcccggcgctttgaccggaaggccgcaatgagagagacctggctcaatgaaaaccagcgcctcgtggcccaggataactttgggtatgacctggcagctgtggaggccgccaagaagaagcatgaggccatcgagaccgacacggctgcctacgaggagcgggtgagagccctggaggacctggctcaggagctggagaaagagaactaccatgaccagaagcgcatcacggcccgcaaggacaatatactgcgcctatggagctacctgcaggagctgctgcagtcccggcgccagaggctcgagaccaccctggcactgcagaagctcttccaggacatgctgcacagcatcgactggatggatgagatcaaggctcacctcttgtctgccgagtttgggaagcacttgttggaggttgaagacctgctacagaagcacaagttgatggaagctgacatcgccatccaaggggacaaagtgaaggccatcaccgcagccaccctgaagttcaccgaggggaaagggtaccagccttgtgacccccaggtcatccaggaccgcatgagccacttggagcagtgctttgaggagctgagcaacatggcagctggcgcaaggacccaactggagcagtccaaacgactctggaagttcttctgggagatggatgaggctgagagctggatcaaggagaaggagcagatctattcttccctggactatggcaaagacctgaccagtgtgctcatcttacagcgcaagcacaaggcctttgaggatgagctccgtgggctggatgctcacctggagcagatcttccaggaggctcatggcatggttgcgcgcaagcagtttgggcacccgcagatcgaggcccgcatcaaggaggtgtcggcacagtgggaccagctgaaggacctggctgccttctgcaagaagaacctccaggatgctgagaactttttccagttccagggcgatgcggatgacctgaaggcttggctgcaagacgcccaccggctgctctctggtgaagatgtggggcaggacgaaggggccacgcgggccctggggaaaaagcacaaggacttcctggaggagctggaggagagccgtggggtgatggagcacctggagcagcaggcccagggattccccgaagagtttcgggattccccagatgtgacccatcggctgcaggccctgcgggagctctaccaacaggtggtggcccaggcggacctgcgtcagcagaggctgcaggaagccctggacctgtacacggtgttcggggagacagacgcctgtgagctgtggatgggagagaaggagaagtggctggccgagatggaaatgccagacaccctggaggacctggaggtcgtgcagcacaggttcgacatcctggaccaggagatgaagaccttgatgactcagattgatggtgtgaacctcgctgccaacagcttggtagagagtggccacccacgcagcagggaggtgaagcagtaccaggaccatctgaacaccaggtggcaggcatttcagaccctggtgtcggagcggcgggaggctgtggactcagccctccgagtgcacacactatgcgtagattgcgaggagaccagcaagtggatcacggacaagacaaaggtagtggagtccacaaaagacctggggcgggacctggcaggtatcatcgccatccagaggaagttgtcagggctggagcgtgacgtggccgccatccaggcccgtgtggatgccctggagcgtgagtcccagcagctgatggactcgcaccctgagcagaaggagaatattggtcagcggcaaaaacacttggaggagctgtggcagggcctgcagcaatccctgcagggccaggaggacttgctgggggaagtcagccagctgcaggccttcctgcaggatctggatgacttccaggcctggctctccatcacccagaaagctgtggcctctgaggacatgcccgaatccctcccagaggctgagcagctcctgcagcagcatgcaggtatcaaggatgagattgacgggcaccaagacagctaccagcgtgttaaggagtctggggagaaagtgatccaaggccagacggacccagagtatctgcttctgggccagcggctggagggcctggatactggctgggatgccctgggcaggatgtgggagagccgcagccacaccctcgctcagtgccttggcttccaggagttccagaaagatgccaagcaggctgaagccatcctcagcaaccaggaatacactctggctcacttggagcccccagactccctggaagctgcagaggctgggatccggaagtttgaggatttcttggggtctatggagaacaaccgggataaggtcttgagtcctgtggactctggaaacaagctggtagctgagggaaacctatactcagacaagatcaaggagaaggtgcagctgattgaggacaggcacaggaagaacaacgagaaggcccaggaggcctctgtcctactgagagacaacctggagctacagaacttcctccagaactgccaggagctcactctctggatcaacgacaagctgctgacatctcaggatgtctcctatgatgaagcacgaaaccttcacaataaatggctaaagcaccaggcgtttgtggcagagctggcttcccatgaagggtggctagagaacatcgatgcggaaggaaagcagctgatggatgagaagccccagtttacagccctggtgtcccaaaagctggaagccctgcaccggctctgggacgagctgcaggccaccacaaaggagaagacccagcacctctcggctgccaggagctccgacctgcgcttgcagacccatgctgacctcaacaagtggatcagcgccatggaggaccagctgcggtcagacgacccgggcaaggacctgaccagtgtcaatcggatgttggctaagctgaagcgagtggaggaccaagtgaatgtgcggaaagaggagctgggggagctgtttgcccaggtgccttcaatgggagaggagggaggagatgcagacttgagcatcgagaagcggttcctggacctcctggaacccctaggaaggaggaagaagcagctggaatcatccagagccaagctgcagatcagccgggacttagaggatgagacgctttgggtggaggagaggctgcctctggcccagtcagccgactatggcactaatctgcaaactgtgcaactgttcatgaagaagaaccagacactgcagaatgagattctgggccatacgccgcgggttgaggatgtgctgcagagagggcagcagctggtggaggcggcggagatcgactgccaggaccttgaggagcgcctggggcacctgcagagctcctgggacaggctgcgggaggcagcggccgggaggctgcagcgactgagggacgccaatgaggcacagcagtactacctggatgcggacgaggctgaggcctggattggcgagcaggagctctatgtcatctccgatgagatccccaaggatgaagagggcgccatcgtgatgctgaagcgacatttgcggcagcagcgtgcggtggaggactacggccggaacatcaagcagctggccagccgggcccagggcctgctgtctgcaggccaccctgagggggaacagatcatcagacttcaggggcaagtggacaagcactacgcagggctgaaggacgtggcggaagagcgcaagcgcaagctggagaacatgtaccacctgttccagctcaagcgggagaccgacgacctggagcagtggatttcagaaaaggagctagtggcctcttccccggaaatggggcaagactttgaccacgtgactcttctgcgggacaagttccgggactttgcccgggagaccggggcgattgggcaggagcgggtggacaatgtgaatgccttcatcgagcgactcatcgacgcgggccacagcgaggcggccaccatcgccgagtggaaggacgggctgaacgagatgtgggcagacctcctggagctcattgacacgcgcatgcagctgctggccgcctcctatgacctgcaccgctacttctacacgggtgccgagatcctgggcctcatcgacgagaagcaccgcgagctgcccgaggacgtggggctggacgccagcacggccgagtccttccaccgggtgcacacagccttcgagcgggacgttcacctgctgggtgtccaggtgcagcagttccaggacgtggccacccgtctgcagacagcatatgctggggagaaggcagaggccatccagaacaaggagcaggaggtgtctgccgcgtggcaggcgctgctcgatgcctgtgccgggcgccggacccagctagtggacacggcggataaattccgcttcttcagcatggcccgtgacctcctctcctggatggagagcatcatccggcagatcgagacccaggagaggcccagggatgtctcctctgtggaactgctcatgaagtatcaccagggcatcaatgcagagattgaaacccggagcaagaacttcagtgcctgcctggagcttggcgagtccctgctgcagcggcagcaccaggcctcagaggagatccgcgagaaactgcagcaggtgatgtccaggaggaaagagatgaatgagaagtgggaagcccgctgggagcggctccgcatgttgctggaggtgtgccagttctcgagggatgcctctgtggctgaggcgtggctgattgcccaggagccctacctggccagcggggactttggacacacagtggacagtgtggagaagctcatcaagaggcatgaggcttttgagaagtccacggccagctgggcagagcgctttgctgccctggagaagcccaccacgcttgagctgaaagaacgccagattgcagagagacccgcagaggagactgggcctcaagaggaggaaggcgagacagcaggggaggctccagtttcccaccatgcggccaccgagagaacgtccccggtcagtctctggtctcgtttgtctagttcctgggagtcactgcagccagagccctctcacccctactagctcagcccaggtggaggcgagatgagctgcgcagccccgccctccatcctccccacatccctgcagccacctcccagcagagcaggctacgtcctcactgaggtgttcttcatgagagtactagcctcctccactcctccccacagcgcagaggaaacaggccagcccagtgacatgacgttattagttttgttttacctgaatgtaataaattttattgtataaatatatcaccatttacatgaggggaaacact

SEQ ID NO: 303 - DNA, 617 bp, Homo Sapiens
tcagtgctggaattaggacaacctcttcattccgtggggttgattctaagatttcagcctcgcttcagtcctgctctaaggtcgacaccacgcttgcttgatagttgaccgtgccttagttttcccgtcagtcaagtgggaagagcagcccatttcctgccgctccccgggccctgtcccgcctggacgcctccctccaggagcctgcgccccggccccgtggtcagggttgggatgcgggctctgcaggcgccccggcgaacagctctacctggaggctgtccctgccccgcttagtccaagggccttggtgtgggggcctccgctgtcaaggcgggggaaccggttctctcggtttctctccccttccccagcggcttcaacgcagacgtgagcccgagccggtccgctcccgccccctgctctccggctctcacgccgccccccgagagaggctgcccacctgccctgtgacccctacagtgtccccaagagagtggcccctggagaatgcactctgagacagtgactgtccgtgcggagtcccaaagcaggggccctcaaagctctccggagtggtcaaaagcaccggtcgcgccccggctgggtgtgtcaag

SEQ ID NO: 304 - DNA, 430 bp, Homo Sapiens
gtcagatcccacaggtttaagggctcattccccaagtctgctcctccagttgagacacaagtcacaaatccaggcttctgaaacttcggaccaaccagcttcaatcagggttcccactaccccctctttggggtagagtggctcatggaactcagagaaacatttatttcggcttgctggtttattataaaagcaaggtttattataaaagatactacaaaggatacagatgaagaggcacatagggcaaggtacggggttccacgccctccctgagtgcatcaccctctgggaacctccgtgtgttcacgtctcatgaagctctccaaatccagtcctcttgggtttttatggaagcttcatgatgtcagcattctttcctccagtgtataggatggggattcctctctgggggagggtctttaaagac

SEQ ID NO: 305 - DNA, 597 bp, Homo Sapiens
gcgaggcctgatccctgcagcgcgggcaggcggcgtcgcagagcggagctagctggatgcgtccggactcctgcaggtgagagtgattttccagtgattgctttggcctgtacaaccagagaacaggattcttcccttctttttggccaccaaatgcctatgtgcaccacacattccagtgtgctgagaagggcagagcttcttggatgatgatggacgtcccaccgggcaggatgaaggcagagcgtgtggcatctccacctcaagggtgcagcctgatcttcctcttctcccttgccagccagcactctgccttctgtatccaccatggtgtttggtgagtttttccatcgccctggacaagacgaggaacttgtcaacctgaatgtggggggctttaagcagtctgttgaccaaagcaccctcctgcggtttcctcacaccagactggggaagctgcttacttgccattctgaagaggccattctggagctgtgtgatgattacagtgtggccgataaggaatactactttgatcggaatccctccttgttcaaatatgttttgaatttttattacacggggaagctgcatgtt

SEQ ID NO: 306 - DNA, 358 bp, Homo Sapiens
tagttatatatttaatgaatcatttttattgcaaagggtaaattacatgaaattgacaaaatttagtccatgtaatatctatcaaaatacatacatgtaagtgtgtgtatatttatatatgtatacagtacagttttcacaaaaagcttcaacattcctaagaaacacagacatagtcattctggtacaatatggatttaaaataagttcatggtaatccttcctgatgccaattttaaaatgaagaccgtctaaatttttctgaccagttattagttgccctgcctctcggaaatgtgtttaaacttttctttcaattatttgataccttttgcccaagagattactatctctctct

SEQ ID NO: 307 - DNA, 455 bp, Homo Sapiens
ttgaatttaggtgacactatagaagagctatgacgtcgcatgcacgcgtacgtaagcttggatcctctagagcggccgcctactactactaaattcgcggccgcgtcgaccaatgacttgaaatgttattgggattcaaagagtgttccataccatcaaattgactgcaacgtttatatgtacaaataattcttagctcatgactgtacaaaaattgggagctcagttatagtttggtgattgctgtggtactcctgtgattggggtggagcccaggaatctgcattttacatgcctctcacgtgattctggtaatgggccatggacccaatggactatccaatcctcggaatgtcgacgcggccgcgaatttagtagtagtagtcgacccgggaattccggaccggtacctgcaggcgtaccagctttccctatagtgagtcgtattagagctt

SEQ ID NO: 308 - DNA, 521 bp, Homo Sapiens
cacgaggccgcatatgactttttttttttttttttttttttgggagtcatcaaaagtgctttatttgtaaagcccggctcatgactggagtgtattgttagcactaggagataacagggcaaacgtcctcactctgtccaaatggtttatcaacagaaataaatgacagactgtttgttatagacaaaaataaaagcattctgtaaacttctaaaagcatacacagattggcccccaaggaaacaattactcaaataatgtatgtgtaccttatctttacttcagggtctcatggttgtggtcttgggtcaaaccacagtagaacttcacaacacaaaaactgatctgatgccagaattaatggtgcagggaaaaaccaaatcatagtatggattactttaaatacataaaagatgaatctgtacactacgtgacagtggtgttaacactggctgctgaggataccaaatctacataaaatgagtggacagtatacggagggcacgactgctggcttccaa

SEQ ID NO: 309 - DNA, 4167 bp, Homo Sapiens
cggcagggagaaggtggatgaaggggccgccaggagggagctgaatggctttctcctggcctgtcctggcttgttgggcatggctcagtatcactcacagtgagagactgagccatgtttcccagccaagggtctctacgagcaggctaggaagatgctgcagtgagtccttctacctgtcttctccaaatgtactttcaagcctgctgggatggccctgcaaggcaggccaccatgcacagctttactcacagcccctggccaggactgccaaggctggcctcatgcagtgagtccggagggaagaccctaaagcttagagctggaagggcccagccctggcaccgactccctggggtgtggttcagggatgactgggacctgcccaaggccgcgcagtcctctgggaggaggcagggcttctaacacagtgcatttgggcttcaagttcatggctctttccagttctcagattacaggcagcaagcagccaagtaacagagaattcctatttccaagtagggaaattgaggccaaagcagattaaggttctcagctgaggtgatgctgtgagctgggggtgtggtctccagtgacccagatgtgaaccagagctgacccaggctgttggtgcccctggaatcctggagagaactctgccttcctattttctccttgtcccctgaggcgacttttcttgagtagatttcctagtggatttcaggagggcagggtaaaaacatgtttagaccacgagagaaaggggctgggaaagttcaggggtctttccatgtcagcacgcttggagcctgcacacctagaaaagaatatggctgcttcgagtgcagcaggaaggatgcaggttagacttaagcaggaacttccaggccttggagaatgtccacctggtaagaagttctccaagatccttttgcgggcttctcctagaggttattaaatattcccactcttgatataaaccctaactagtgtagtgatggcacattagagttgaccaggggctgcattagaaacatctcaccgtttcttcagcccagccctgccaggtgagtgggacagtgctgactgttttgcaggccagggacctgagccttaggagcatgagggggactttggattctagatgtttcttgcttctctgcccctgtatcctacccgctggagcacacggttggggtggacacttcctggaggcagaagagtggaggagatggccttctgagttctccttggcatcctgctttggatgtggtggcgaggaccgtccctgtcctcagctctattcctctgagttgttgtggccaagagagaatgcagagtctcactccttagccttgttctatctcctcttgggccttgttctgctccaagtatgaagtgttcagttctccagaggggcccgacctgggaaagtagagaaaccacgtggcctggggccctggcagggagccaagtcattccttgggcctggggccagcctgctgcagccaggagctcgggcatgtggaggaaggtccctgctgctggccaggctgggcatgcatgccatgtggtcgccttacacatgcaggcatggccagagagagggaagcagatggggttgaagtgggggctatacattccagctcagcagccgccaccctaagacccagggagctctggggtgactgctggaaatggctctgccacttagtagcggagggatgaggcaaggtatgggtgagggggtcttgggtgtgttctgggctgcagtctccccattggtgtaatgaggtggtgaacatcaagaacgtctcgggtcctttcatccttagaccatctgtgattgttccaatcagagatttgttccagcacctttaaagctcttttttccaaccactgtgctcttaattacaaaccctagattcctagaggtcatctgcttgacccctccattggaagggagattgaagatggagacaggggttgactcccggaggccctcagcgtgtccaagcagaaccagtcctcagcatcaatcatgccattcctttttgcacattagctcagggctctaatgagccctcggagagcctgtaggctggttctagttcatctgttcattcagtgtccagttgtagctaagagaacagcttctggagtcacactgcctaggttcgaatctcatctctgctatgccagggctgtgtgactttggaaacatttcctagcctttcagaatcacagtttcctcatctcaaaaattcagccaataatagggacctgttgggtggtcacgctgttggggtttactgttgctatgattgtttcatcccaccatcatcgccctctggctagactcaggctgcattttgtctgcagaggttactcccctccagaaactgactcaaaattctgatgaccgtctctcccttgcttatacctcagagacattccctcacatggctgaggcctcccatgtggcagtgaggcaccctcactgaggcacccttcatgtggcatctcagctcatcctcacagcactcccttttggatggcaaagagaactgaggccccaagaggcctgtgggtggtgcagtcaggactgtcttggggcaggctggccagcctggaatggcctctgaatgcagacccatgggtctgagacctgcctggcagctgctgtatgtgaatatattgggcatcacagggtcctaaaggatccttagagatcacacacctccaacctgagcaggacagagggtcaagtgtgggggcctgcccaaggtcagacagccagcctagaggagagccagggctcatctgcaggccatctccatatgctggacttggagaacagggcaggactacaagttctgtcccttgtaggccatgtggagtcagccaggtgcccagccagacaacattgcccttgtctcaaggagttgctttcctctcctaccaggttcttctaccccaaagttcagaggccagaggtgggaactcaatgccttcagaaggtgccctggctggacgccatggctcacacctgtaatcccaacactttgggaggccaaggcaggcagatcgcttgagcccaaggagttcgagaccagcttgggcaacatggagaaaccccatctttaccaaaaatacaaaaattagccaggtgtagtggtgtgcatctgtaatcccagctacttgggaggctgaggcggcaggatcactaggaggcagaggttgcagtgagcagttatcacagcactgcacttcagcctgtatgacagagtgagaccctgtatcatgaaaaaaaaaaaaaggaattccctgttatgacagagagatgatgaaagtaggcagggctgtgttcctttgtgtagcctgtatatattttccatatgtagagccctgattaacttcaaggacaaacactggctggagaaagccagactgatgggaatgagactttggccaaaaatcccaaaacatcattttcaatcagtaaagaagtgcttagggttgaaaattgatttcatttgctactgaatttggtaaatcctgggtaacttttatcaagatgaagacattttaccctacctactctagaaatatacaacaatgttatattttacactccttggaaacatttgaggaaaaaaatgcaatttgcacttcactttgttggaatatcccatagcactcaataaactcagctgctagagtgccgatgtcaggagggctgtgtcgggtaatgcgtgtggctgaatgggcataaccactgtggcttcttgtgctgcagaagctcgttgacaagactgaggaggatttcaagagcaaccaagtaaagtcatgcattttctaattttgtgtatatggaatatatttttaaatagagatttttttactttagataatgtgttaatattgctattacctaggttaagcactattgtctgtgctagtaagaaaaagaaaggaaaaccatcattgctttatagtagcttatatcaatttagatttcatcattactattttgcatactggaatttataaatgtgtaaattatcattttcttagttttgtaataccttttttatttgtgaataaaattatcacctggtatttttaaaaaaaaaaaaaaaaaaaaaaaaaaaaaaaaaaaaaaaa

SEQ ID NO: 310 - DNA, 8046 bp, Homo Sapiens
ctgcggcggcgcgctccgagcctgcgtctagggcgcccccgggtcagagctgtcgccgtggccgccgctgcaaagaacaatgtaccgcaagcagcgctcgctcctccgtttcttcccaccggcctaaagacgacggcgggggcggcccgcgcagcggccgcagctctggctcctcttcaggcccggctcgccgcagctcaccgccgccttccgccctccggctcctcgtcgcggaccccggctcgccgaccccgctcgccctcaaggcaccgcggccgccgggcctcgccgtccccgccacgggttcgtcgcgtctccccgtccccgcctcgggcccgtcgcggctccccgtcgccaccgcggggccgacgactcttcccgccgggcccggccggcttcagaggcagcagccgaggggagtcccgcgccgactatgcccgggacggccgcggagaccatccaggcgacagcggcagccggagacgctctcctggtctgtgttctgactctttggaaaagagcttaaggatcactgttggcaatgaccacttctgtgttagcacaccagaacggcgacggcttagtgatcggctggggtcaccagtggataatctggaagacatggacagggatgacctgactgatgattctgtcttcactcgaagctcccagtgctctcggggtcttgagcgatatatttcccaggaggaagggcctctcagtcccttcttgggacaacttgatgaggactaccgaacaaaagaaactttcctgcatcgatctgattatagtccccatatcagttgtcatgatgagctgttgcggggaacagaacggaatcgagaaaaactcaaaggctactccatacgatctgaagaaaggagccgggaggccaaaagaccccgttatgatgacacagtgaagataaacagcatgggaggggatcacccaagttttacatcaggaactcgcaactatcgacagcgtagaagaagcccaagtcctaggtttctcgaccctgagtttcgagaactggatcttgccagacgaaagcgagaggaagaggaggagcgaagtaggagcttgagtcaggagctggttggggttgatggtggtggtactggctgttccatccctggattgtcaggtgtcctaacagcatcggagccaggatattctttgcatcggcctgaggaagtatctgtgatgcccaagaaatccattttgaagaagcggattgaggtggacataatggagccctccatgcagcttgagagtttttccagcagtaccagctccagccaggatcaccctctctactctgggcacccatcccttccactaagtggtgctattgctgcttttgcctcagagattgaaaacaaggggactatggtagagactgccttgaaggaacctcagggcaacctctaccaatggggtccccttcctgggattcccaaagacaacagtcctctcagagaaaaatttggaagttttctatgccacaaggataatttggatttgaaggctgagggacctgagcgacacacagacttcctgctgccccatgagagagctagccaggatggcagtggtttttcccgcattctgagcatgttggctgattctaccagtacacaggaaaaaaggcgacgtagctttcccgacattgaagatgaggagaaatttctctatggggatgaagaagaggatttaaaggcagaatccgtaccaaagccccttgggagctctgagagtgaagttatgaggcagaaggcaagctccctgccgtcttcagctccagctgtaaagctagaatcactagaagagaccaatccagaatatgcgaagatccatgacttgctcaagacaatagggctggatattggagtagcagagattagtcaattggctgcacgcacccaggaacgacttcatggcaagaagccatcattacgctcctcagctgaccgccgttcctcagttgaccgatacttttcagctgaccactgttcctcagttgaccaccgcttctcagctgaccgctgttcctcagttgaccactgcttctcagctgatcgacgttcctcagatccccacagactagagagcagggaggcacatcatagcaatacccactctccagaggtgtcccatccacacccaccttctcctgtggatccttacctgctcacaaaaaacagccctccattcctaaagtctgaccatccagtgggtcatatttcaggaccagaggtggttggtagtgggtttcagtcatctgttgcagtcaggtgcatgttgccatcagccccatctgccccaattagacttccacacactgctgctttatctcagtttcacatgccaagggcctctcagtttgctgcagctcggatacctccgaactaccagggacctgccattccccctgcctcttttgatgcctataggcactacatggcatatgcagcctccagatggcccatgtatcccacctctcaaccgtcaaaccaccctgtacctgaaccacacaggataatgccaataaccaaacaagctactcgtagccgtcccaatcttcgtgtgatccccactgtgactcctgataagcctaagcagaaagagtctctgcgaggctcaattcctgcggcccaagtgcctgtccaggtgtccattccatcactcataagatataatccagagaagatctctgatgagaagaaccgtgcttcccagaagcaaaaggttattgaagagagggaaaaactaaagaatgaccgggaagcccgccagaagaagatgtactatcttaggaccgagttagagcggcttcataaacaacaaggagaaatgctgcgcaagaaacgaagggagaaggatggccacaaagatcctctcttggtggaggtgagtcggcttcaggataacattatgaaggacattgcagagctacggcaagaggcagaagaggcagaaaagaagcaatctgaactggacaaagtggctcagatcttgggaattaacattttcgataaatcccagaagtctttaagtgacagtagagagcctacagagaagcctgggaaagcagaaaaatctaagagcccagaaaaagtgtcatcgttctcaaactcctcctccaacaaggaatcaaaagtaaacaatgagaagttttgtattaagagccccaagcctgccgaaagcccccagtcagccactaagcagttggatcagcccactgctgcttatgagtattatgatgctggcaatcactggtgcaaagactgcaacaccatctgtgggaccatgtttgatttcttcactcatatgcacaataagaagcacacacagacactggatccctacaacagaccttgggcttcaaagacccagagtgaggccaagcaagatgccataaagcgcactgacaagataactgttcctgcaaaaggctctgagtttctggttcccatcagtggattttattgccagctctgtgaggaatttttgggggatccaatttctggggagcaacatgtgaagggtcaccaacacaatgagaaatacaagaaatatgtggatgaaaacccattatatgaggagcggcggaatctggaccgccaagctggcttggctgtggtcctagagacagaacggcgacggcagagtgagctaaagcgcaaacttagtgagaaaccaaaggaggagaagaaagaaaaaaaggcaaaggctgtgaaagaagtaaaggaggatgacaaggtctctgagaaattagaagaccaactctctgagggtaggaactcccctgaaaaagctgaaaataaaaggaacactggcatcaaactccagtttaaagaagaagtaaagaaggaatcaccaacatcatcttcttttgggaaattcagctggaagaagcccgaaaaagaagaggagaaaagttccttggtgaccccaagtatctctaaagaagagattctagaaagtagtaaggacaaagaggatggcaaaactgaagctgggaaggcaaagcctatcaaaatcaagctctctgggaaaactgttgttgcacataccagcccttggatgcctgttgtgacaacttccacacagactaagatcggacccaacctgcctattccatccacagtactccgcaagtcatgttcagccacaatgagcaagccagctcctcttaacacctttctgtctattaagtcctctggaaccactgctaaacctctgccagtggttaaagagtcttcagctgatctcctcttacctccagacatcatctccaaagcatttggaggggaagaggtgattctaaaagggtctccagaggaaaaagtggtgttggctgaaaagagtgagccatctcatttacctgaacaaatactaccacctcctccaccacccccacctccaccacctccaccaccccccgttatacctcatccagctgccccgtctgctgctcaagcaaatgctatcttggctccagtaaaatcaaacccagttgtatctcaaactctcagccctggcttcgtgggtcctaacattttgaacccagtgttgcctgtagccatcatggcctcagcacagccagctgccattccttctgatgagacagctcctggggtgagtgagagtgaccgagaccagaccctgttctctgtgttagtacgtcctccaccacccctctcaagtgtgttcagtgaacaagccaaaaaattagagaagcgaaattcatgcttagccacagccaatgctaaggacctgtatgacatattctatagtagtggtggaaagggggcccctgagactaagggggcccctgagactaagctaagtggtggtccattggccaatggggaaaatagcaacctctctagaaccaaaagttcagacacctcttctacttctcctttgaacagcagtgcatcccaagaggagttgcatcaagatgagggtttggtcgctgctcctatagttagcaactctgaaaagcccattgcaaaaactctggtggccctagggaaatggtcagttgtagaacatgtaggcccaaaaagcacaggcagcacctatggcttcctacagcctctgacaaggttgtgccaaagcaggccttatgaaacaattaccccaaagacagacactttggccatatggacctctagttccttccagagtgacactagtagggatatatctccagagaagagtgagcttgacctgggagagccaggaccacctggtgtagaaccacctcctcaactgttagatatacagtgcaaagaatctcagaagttggtagaaatccacctcagagaatctgttaaccaggataaggaaagccaagagctccgtaaatctgaggattgtagagaaagtgagatagagacaaacactgaactaaaagaaagggtaaaggagctgtctgaggggatagttgatgagggagcaagtaccagcattggaccccacagcatagatgattctaatttgaaccatggaaacagatacatgtgggagggagaagtaaaacagcccaacttgctaatgattgacaaagaggctgaacagtccaataaattgatgacaggaagtgaaactccaagtaaagtagtgatcaaattgagtccacaggcttgctctttcacaaaggcaaaattagactcatttttatcagaagctaggtctttactcaacccacaagatacacctgtgaaaatttctgccccagagttgctgcttcattccccagccagatcagctatgtgtttaacaggtagtccacaagagcaaggagtttcagttgttagtgaggaggggctagagaattcagctccagaatcagcttctagaacttctaggtacagaagtctcaaactcaagagagaaagatcaaaagactttcaagttaaaaagatctatgagttggctgtttgggatgaaaacaagaagaggccagagacctgggagagcccagagaaaccaaaaacagaagcactggagctacaagatgtccatccagagttaacagtgacaatagaaagcaaggccctagaagactttgaagctacagacttaaaggtagaggagcttactgccctggggaatctgggggatatgcctgttgatttctgcactactcgggtaagcccagcacatagatccccaactgtcttgtgtcagaaagtgtgtgaagaaaattctgtatcacctatagggtgtaattcctccgatcccgctgacttcgaaccaatcccatctttttctgggtttccgttagattctcccaaaaccttggtgcttgactttgagacagagggtgaacgaaactcacctaatcccaggagtgttaggatcccttctcctaacattttgaaaactggacttacagaaaatgttgaccgtggcttggggggcctagagggaacacaccaggcccttgacctgttagcaggaggaatgatgcctgaggaagtaaaagaatcttcccaattagacaaacaagagtcactcggattggaattaaaaacaattaattttgcaggccttgggccatctccttgccttccagaccttgttgactttgtcacacggacctctggagttcaaaaagataaactgtgttctccactctctgagccaggtgacccttctaaatgtagttccctggagttggggccattacagctagaaatatcgaatgcatccaccacagaggtggcaattctgcaagtagatgatgacagtggcgaccctctgaatttggttaaagctccagtgtcaaggtcccctccaagggagcaggtaattgaagacaatatggtccctcagggaatgcctgaacaggaaactacagttggtgccatccaggaccacacagaatccagtgttcacaactaagaataaatacctagagctacttgtgagtgaatcattggcttctagaaatcagatgcccagatgatccaagactagtttgttatctcatctggaacctacaccaagagatgcagtcagcatcttaaagtaaatgttcatggaagctaaaaaatttacctcctttccttttccctttccccttaaaacaccagacaaatcgataacaacttatatatatatatatatatatctgtaaaaatgtattttgttaatttttttggccaatttattttctcccactttgtcattaaaatcacatgtctaactggctcaccacatagtgtgctttgattgtattttggctttgactctgccatttctgaaatgtgggggaggatggaggcagctgacctctccagttgctgtgttgtattcctacccaatttcctgggcagttgatgcatctctgggaaaaacaccagaaagcttgctgaaatggaaaacttggaagaattgttcatctcttaggcttccatttggatgggcctgccttaacattgtttgaaatgcagcgtgagtagctcttttgtttactgtttacaccccttattggcatgtcaactcctgtacttcccttactctgttgcctttcttgagatgcattgtcctgctaacccacaaacctgtttggaaataaacatggaagaatatctggcaggcttacttttagaagacgacaaatcggtaaggcttattcatggttcattgccaggagcagatatgcttttgagatcacttttatttttgaaatggcctttgttcattgtattgtgatccaataacactttgtattaaattgtttagcagccatttgtgttgtgaaggggtagaagatctctgaaacttgtctttagattgaactcattccctgttccacaaacccatatgtatcctttcctcaacctcctcctttcccaattaatttcaaccatagtacgatgtttggggttgtatattttgttaaaaagattaaagaatttatgagttggcttggacaagtttaactttatttttaatgtgttaattacttggaataaatgcattaatttcagaaaaaaaaaaaaaaaaaaaaaaaaaaaaaaaaaa

SEQ ID NO: 311 - DNA, 443 bp, Homo Sapiens
gcctactactactaaattcgcggccgcgtcgacggagagccagcctgtccccttgaccacctgggtgcagggactctccccggcacctgacggacagtgggacctgcgagtctcaagggccagatttgcctttcagagctgtcctggaacttacccaagatagggacagtcagacttgcacccaagcattgctggtccccaaggtttcatcggggcttcacccacttctgttgtcagaggtgtgcatcctcacacaggtgacactggcaggcagtcattttgggaggacatggtaagaaggcgacactttatgtcctgaaatctgatagtattgattgtaatagctgcaaagaccagtgcattatgtaaatttggttttatttattctgctgacatttaaacttttgttaactcagaatatttgagacatacgcacataactg

SEQ ID NO: 312 - DNA, 432 bp, Homo Sapiens
gcctactactactaaattcgcggccgcgtcgacttttttttttttttccataacgaaagagagatttcctattgctctgccctacagagctctttcttggattaagtcaattatcatggttaggtgtcacatgtttttgccaagagacatttgtgaactaattctgtcaaacaggggatctggatttgtcctctcccacaattagaccttgggtgaaacatgaaaccggctttgagctctcctccctgcctttcctgggctgccaaaccccaagccaaggttgccactcctctgcttttctggagtaaaacctcaggccccgtgatgatcctggctctcacaccattgacagcctcaaaaatgaggggaaacacacttgttttggagggaacgggagagacacatgaagaagggtcaagtacaaacccaaag

SEQ ID NO: 313 - DNA, 464 bp, Homo Sapiens
ttttttttttgtggtgagagccatgaattttaattagaggaagcatataaccagcgtgtgtgttttaaagttcattctttattctgttaatacactaataattcaaatcaattttaggaaaaaaaggaaactacagataggcataacttaaaaaaaacatcacctgtaatctcaccagagataatcaccatttgaccataaataacaagcaatctgtctcacttatctattactgtttaacaaccctcccccaaaacctcgtggcttaaaacaataatttgttatttctagtgagtctgtgggttgatagggatcgactgagtagttcctctgttttctgtggtgtagctgaggatacacccacattcagctgggagcttaaggctggaacatccaagataatctctcatcctcaagagtctctctccacatggcctctcatctttcagtaatccagctgagct

SEQ ID NO: 314 - DNA, 463 bp, Homo Sapiens
ccattttggcaggctggtctcaaactcctggccttaaatgatcctcccacctcggcctcccaaagtgctgggattacaggcatgagccactgcacccggccacttttttttttttttaaagaaaaatgctctgcatggattggagacacagcaataactactgttgccatggaagggttaacagtgtaggagctggtttatcagtccgctttgacatacagctaaaggaaatttatgtttgggggaaaaaggccctctgttcactttaaaattcagtgtggacttatgccaaagggggctgtttaagttgaaagaagccaagttaagtttggcctcttgcctggaatcacttgaattctgaaatttcactgcgacggacatgtgccttgtcacattttccattgcttaatcctgaagtttggtgcaagtctctctgcacctattaaaaagtgatgtatatact

SEQ ID NO: 315 - DNA, 469 bp, Homo Sapiens
  misc_feature (427)..(427): n is a, c, g, or t
  misc_feature (438)..(438): n is a, c, g, or t
tttttttttctaattcattgaatttttatttttccctacattctggagaactaggcaaatacaagcagagagcggttgtaattttgtgcaacagacactgaccggctttttattttatctttttatatttgggggagggggggaatgattgtactggtaaagtctctcaaacctccaaagaacagcttattccaatgctataataagttacaggcataaaatgatatactctcccaatttcttttatgaaacagcaaatctctcctgctaaaaccgaaacagagaacaataaaacatttgaccaacgtcattcatagacctaggatgttcaacttaagtactcaatcaagtgtctatgggaacaaaggattttggaaaaaaatgcttaggtatgggcgtttgtttcaactctggatataattccgtncatcctgtagnttttaaccagttttattttcccgttaaaatg

SEQ ID NO: 316 - DNA, 2307 bp, Homo Sapiens
gtgactgtggagtttgaattgggtggcggttgactgtagagccgctctctctcactggcacagcgaggttttgctcagcccttgtctcgggaccgcagcctccgccgagcgccatggctcctaggaagggcagtagtcgggtggccaagaccaactccttacggaggcggaagctcgcctcctttctgaaagacttcgaccgtgaagtggaaatacgaatcaagcaaattgagtcagacaggcagaacctcctcaaggaggtggataacctctacaacatcgagatcctgcggctccccaaggctctgcgcgagatgaactggcttgactacttcgcccttggaggaaacaaacaggccctggaagaggcggcaacagctgacctggatatcaccgaaataaacaaactaacagcagaagctattcagacacccctgaaatctgccaaaacacgaaaggtaatacaggtagatgaaatgatagtggaagaggaagaagaagaagaaaatgaacgtaagaatcttcaaactgcaagagtcaaaaggtgtcctccatccaagaagagaactcagtccatacaaggaaaaggaaaagggaaaaggtcaagccgtgctaacactgttaccccagccgtgggccgattggaggtgtccatggtcaaaccaactccaggcctgacacccaggtttgactcaagggtcttcaagacccctggcctgcgtactccagcagcaggagagcggatttacaacatctcagggaatggcagccctcttgctgacagcaaagagatcttcctcactgtgccagtgggcggcggagagagcctgcgattattggccagtgacttgcagaggcacagtattgcccagctggatccagaggccttgggaaacattaagaagctctccaaccgtctcgcccaaatctgcagcagcatacggacccacaaatgagacaccaaagttgacaggatggacttttaatgggcacttctgggaccctgaagagacttcttcccttcaggcttattgtttgagtgtgaagttccagagcaaggagccatgttcctctaagggaattcaggaattcagacgtgctagtcccacaccagttaggtagagctgtctgttcaccctcccatcccagctgatcccagtcactgcttgctggggccatgccatggaagcttcccatcagtctcccagctgaatcctccctgctctctgagctgctgccttttgcctcctgcaactcaacatcctcttcaccctgccctgcctgcagttgagggggcgaagaagaaccctgtgttctcaggaagactgcctccaccaccgctacccagagaacctctgcatctggcatttctgctctctatgcttgagaccgggaggtttaggctcagataagtgagctctgggccatgagagggtaggtccagaaggtggggggaactgtacagatcagcagagcaggacagttggcagcagtgacctcagtagggaacatgtccgtctaccctctcgcactcatgacacctccccctaccagccctcctcttcctcctcctcctcctcctgtgggaggtggtcagtgggacttagggatctttcacctgctgtgcccagtagttctgaagtctgcttgtggagcagtgttttatgtttatccctgtttactgaagaccaaatactggtttggagacaacttccatgtcttgctcttctacctccctagttagtggaaatttggataagggaactgtagggcccagattctggaggttttatgtcattggccacagaataactgtctctaagctatccatggtccagtggtccctgccaagtctgtagacttcagagagcacttctctcttatggggttcatgggaacaggggcgggtgtgacttgcttggtggcctcattccatgtgtgcctgtgcctggggcatggactttgttaagcagagtcagcagtgaggtcctcattctccagccagcctctctgccctggagaatcatgtgctatgttctaagaatttgagaactagagtcctcatccccaggcttgaaggcacatggctttctcatgtagggctctctgtggtatttgttattattttgcaacaagaccattttagtaaaacagtcctgttcaagttgtattcttttaagttcttttattctcctttccctgagatttttgtatatattgttctgagtaatggtatctttgagctgattgttctaatcagagctggtacctactttcaataaattctggttttgtgttttcttctgt

SEQ ID NO: 317 - DNA, 684 bp, Homo Sapiens
gcatcatggaccgatctaaagaaaactgcatttcaggacctgttaaggctacagctccagttggaggtccaaaacgtgttctcgtgactcagcaatttccttgtcagaatccattacctgtaaatagtggccaggctcagcgggtctgtgtccttcaaattcttcccagcgcgttcctttgcaagcacaaaagctgtctccagtcacaagccggttcagaatcagaagcagaagcaatgcaggcaaccagtgtacctcatcctgtctccaggccactgaataacacccaaaagagcaagcagcccctgccatcggcacctgaaaataatcctgaggaggaactggcatcaaaacagaaaaatgaagaatcaacaaaagaggcagtgggctttggaagactttgaaattggtcgccctctgggtaaaggaaagtttggtaatgtttatttggcaagagaaaagcaaagcaagtttattctggctcttaaagtgttatttaaagctcagctggagaaagccggagtggagcatcagctcagaagagaagtagaaatacagtcccaccttcggcatcctaatattcttagactgtatggttatttccatgatgctaccagagtctacctaattctggaatatgcaccattggaacagtttataagagacttcagaaacttcaaagtt

SEQ ID NO: 318 - DNA, 337 bp, Homo Sapiens
atcccctggtacgggagtgactcctggtaggagctctgtggtgactgtcttctgtaagcccgggttgatattggggaaaacagccaggaaactgattgccctgatatcaactgggatgtgggattctggacaaggtcagtagggtgttgctgacccagtgagtatgatcagagacacgtcaggctctgccagccggacagcagctgccacagtctctcacccagtttccagatttgagtgaaattcagactcacagctgccaaactgaagaggaggctggaagccctagggcgtgcggctctcccaatacaaagcatgccaaccactcccgtaccag

SEQ ID NO: 319 - DNA, 4764 bp, Homo Sapiens
ctgtcttggtacctgcggtagtagcctggctttgctctgacggcgatctcgcggcccgagagccttttataggttgcttttcccggggatgtgaaggatacagaaatgactgtgaatcaacccatatcatcaaggagctgataatctagtggaagagttagacgtgtgcatacttcactatgatatgaggcagtctctgagcttatattctctgtggaagatgtgacatatccaggcggaacatcatgatgcagggaaacacatgtcacagaatgtcgttccacccgggacgagggtgtccccgaggacgaggaggacatggagccagaccctcagcaccatcctttaggccccaaaatctgaggctgcttcaccctcagcagcctcctgtgcaatatcaatatgaacctccaagtgccccttccaccactttctcaaactctccagcccccaattttctccctccacgaccagactttgtacccttccccccacccatgcctccgtcagcgcaaggccctcttcccccctgcccaatcaggccgcctttccccaaccaccagatgaggcaccccttcccagttcctccttgttttcctcccatgccaccaccaatgccttgtcctaataaccccccagtccctggggcacctcctggacaaggcactttccccttcatgatgccccctccctccatgcctcatcccccgccccctccagtcatgccgcagcaggttaattatcagtaccctccgggctattctcaccacaacttcccacctcccagttttaatagtttccagaacaaccctagttctttcctgcccagtgctaataacagcagtagtcctcatttcagacatctccctccatacccactcccaaaggctcccagtgagagaaggtccccagaaaggctgaaacactatgatgaccacaggcaccgagatcacagtcatgggcgaggtgagaggcatcggtccctggatcggcgggagcgaggccgcagtcccgacaggagaagacaagacagccggtacagatctgattatgaccgagggagaacaccatctcgccaccgcagctacgaacggagcagagagcgagaacgggagagacacaggcatcgagacaaccgaagatcaccatctctggaaaggtcctacaaaaaagagtataagagatctggaaggagttacggtttatcggttgttcctgaacctgctggatgcacaccagaattacctggggagattattaaaaatacagattcttgggccccacccctggagattgtgaatcatcgctccccaagtagggagaagaagagagctcgttgggaggaagaaaaagaccgttggagtgacaaccagagttctggcaaagacaagaactatacctcaatcaaggaaaaagagcccgaggagaccatgcctgacaagaatgaggaggaagaagaagaacttcttaagcctgtgtggattcgatgcactcattcagaaaactactactccagtgaccccatggatcaggtgggagattctacagtggttggaacgagtaggcttcgtgacttatatgacaaatttgaggaggagttggggagcaggcaagaaaaggccaaagctgctcggcctccgtgggaacctccaaagacgaagctcgatgaagatttagagagttccagtgaatccgagtgtgagtctgatgaggacagcacctgttctagcagctcagactctgaagtttttgacgttattgcagaaatcaaacgcaaaaaggcccaccctgaccgacttcatgatgaactttggtacaacgatccaggccagatgaatgatggaccactctgcaaatgcagcgcaaaggcaagacgcacaggaattaggcacagcatttatcctggagaagaggccatcaagccctgtcgtcctatgaccaacaatgctggcagacttttccactaccggatcacagtctccccgcctacgaactttttaactgacaggccaactgttatagaatacgatgatcacgagtatatctttgaaggattttctatgtttgcacatgcccccctgaccaatattccactgtgtaaagtaattagattcaacatagactacacgattcatttcattgaagagatgatgccggagaatttttgtgtgaaagggcttgaactcttttcactgttcctattcagagatattttggaattatatgactggaatcttaaaggtcctttgtttgaagacagccctccctgctgcccaagatttcatttcatgccacgttttgtaagatttcttccagatggaggaaaggaagtgctgtccatgcaccagattctcctgtacttgttaaggtgcagcaaagccctggtgcctgaggaggagattgccaatatgcttcagtgggaggagctggagtggcagaaatatgcagaagaatgcaaaggcatgattgttaccaaccctgggacgaaaccaagctctgtccgtatcgatcaactggatcgtgaacagttcaaccccgatgtgattacttttccgattatcgtccactttgggatacgccctgcacagttgagttatgcaggagacccacagtaccaaaaactgtggaagagttatgtgaaacttcgccacctcctagcaaatagtcccaaagtcaaacaaactgacaaacagaagctggcacagagggaggaagccctccaaaaaatacggcagaagaatacaatgagacgagaagtaacggtggagctaagtagccaaggattctggaaaactggcatccgttctgatgtctgtcagcatgcaatgatgctacctgttctgacccatcatatccgctaccaccaatgcctaatgcatttggacaagttgataggatatactttccaagatcgttgtctgttgcagctggccatgactcatccaagtcatcatttaaattttggaatgaatcctgatcatgccaggaattcattatctaactgtggaattcggcagcccaaatacggagacagaaaagttcatcacatgcacatgcggaagaaagggattaacaccttgataaatatcatgtcacgccttggccaagatgacccaactccctcgaggattaaccacaatgaacggttggaattcctgggtgatgctgttgttgaatttctgaccagcgtccatttgtactatttgtttcctagtctggaagaaggaggattagcaacctatcggactgccattgttcagaatcagcaccttgccatgctagcaaagaaacttgaactggatccatttatgctgtatgctcacgggcctgacctttgtagagaatcggaccttcgacatgcaatggccaattgttttgaagcgttaataggagctgtttacttggagggaagcctggaggaagccaagcagttatttggacgcttgctctttaatgatccggacctgcgcgaagtctggctcaattatcctctccacccactccaactacaagagccaaatactgatcgacaacttattgaaacttctccagttctacaaaaacttactgagtttgaagaagcaattggagtaatttttactcatgttcgacttctggcaagggcattcacattgagaactgtgggatttaaccatctgaccctaggccacaatcagagaatggaattcctaggtgactccataatgcaactggtagccacagagtacttattcattcatttcccagatcatcatgaaggacacttaactttgttgcgaagctctttggtgaataatagaactcaggccaaggtagcggaggagctgggcatgcaggagtacgccataaccaacgacaagaccaagaggcctgtggcgcttcgcaccaagaccttggcggaccttttggaatcatttattgcagcgctgtacactgataaggatttggaatatgttcatactttcatgaatgtctgcttctttccacgattgaaagaattcattttgaatcaggattggaatgaccccaaatcccagcttcagcagtgttgcttgacacttaggacagaaggaaaagagccagacattcctctgtacaagactctgcagacagtgggcccatcccatgcccgaacctacactgtggctgtttatttcaagggagaaagaataggctgtgggaaaggaccaagtattcagcaagcggaaatgggagcagcaatggatgcgcttgaaaaatataattttccccagatggcccatcagaagcggttcatcgaacggaagtacagacaagagttaaaagaaatgaggtgggaaagagagcatcaagagagagagccagatgagactgaagacatcaagaaataaaggagggcatgcaagtgtggagtatttacttgctcagtaactgtgactgttgtctattgagacctagcctagttttcctgcagacaatgaacgaagtgtgctcattgaaataaaatacagagtcaaatcgctattgttgttttaatgatctgtttttagctggatggtctttattacaaagtattagatttttcttctatttaacggaaaacttgactttggtgaatgtgcattacttccttttattttgctctttaaataataaaattcaagaagcatattctatgtggaatagatcctgtttttccatctgtgtcccagattgtgaccctagactttcaattgacaagtaaaaaattgactttactagtaaaaaaaaaaaaaaaaaaaaaaa

SEQ ID NO: 320 - DNA, 434 bp, Homo Sapiens
ctcatatctgccatagaaaggcaatcaagcttactccctgcaatcggagtcaatatcaattcttgctcaagcaaacatgttttacagtgttggcgcaatggcaggaactagtcaagggcactttcagatctggaaagaggaaagagaaaatcactcttttgtgtttcttaaactgtcaatcaagcaagaaaatttattccaccccttcatatttgctctaaaatctggggccagtagttgaaatgtgatcttgttctttctcagccttttggcaatttaatgccaaatattccaaatgttagatgaatggcagtaataaaatgattcaaatgtttgataaatacaagctgagagcaaaatctggactctgaaaaatcggaactattttatcatgttgctaaaatgagagcatcattttcttccctctctgtaag

SEQ ID NO: 321 - DNA, 126882 bp, Homo Sapiens
gatctaacttttagtttaagtaaacataaattcttattagtgagtgaataaaatactaatactgttattgtcaaaaaatggcctctcctaccatcaaaatgctaccttcaaagaaagtagctcaaaactctactcttctgagtttcaaatacttgtgttagtcccctaaagaggtttttttttttttaagtaattgcattaggattcccttctagctgcactaatggctatggaagaatattcatttttagggaaatagaacatacaaatatgaaattagttcaagacctctcatcctataaaatggtccaacactatatgaatagcaatctacttagtaaatagtaaataaagtgcttggttccataatgaatttatcacactgatcatcgttaaatcttgtctgatccagctccaatttgtttatactgccctggcagccacaggcattctcaaagggcaagaggccaggagccaggcggaaggaaaaatgctgcctgcagcccttcctggattatcatcctcttgtaatcctagtggcttgctttgtgagtcatctgttttggaggaaaagaccgctactctaaagcaatcaaatttcttaccattaaaggctgaaatgataagcaagaaaaaaatagtaagagaatgatgtataataaggagctttatttatccttggttacattttttttattattatgcttgaagttctgggatacatgtgcagaacgtgcaggtttgttacataggtatacatgtgccatggtggtttgctgcaaccatcagcctgtcatttacattagctatttctcctaatgccatccctaccaacacccccaccccctgacaggccccagtgtatgatgttcccctccctgtgtctaggtgttcttattgttcaactcccacttatggatgagaacatgtggtgtttggttttctgttcctgtgtcagtttgctgagaatgatggtttccagcttcatccatgtccctgcaaaagacatgaactcatcctttttatggctgcatagtattccattgtgtatatgtgccacattttctttatccagtctatcattgatgggcatttgggttggttccaagtctttgctattgtgaatagtgctgcaataaacatacttgtgcatgtgtctttatagtagaatgatttataatcctttggttatgtacccagtaatgggattgctgggtcaaatggtatttctggttctagatccttgaggaatcgccacactgtcttccacaatggttgaactaatttacactcccaccaacagcataaaagtgttcctatttctccacaccctctccagcatctgttgtttcttgactttttaatgatcgccgttctaattggcatgagatggcatctcattgtggttttgatttgcatttctctaatgcttggtcacatttttgatcagcacattaaagaggcaaaggcatttgcacctcaaaattctagagaccttctaccaatgtataaccagaagaaaagaagggaaagcatattttaaaaatcattttctttatttctttttaaatgactttgaaacagaggaatttttcccaacaaggcactgaaaaatctgaccaagaaaccccttaacagttatagtatcacaaaggatgatatttaaagatgcgcttttagggagcctcttatcagattacctttttcctttcacaaattattcaggagagatatagggctgccagatgaaggaaatgcattattgaagggtactgggtttggggaaaactttataatacagtctcattaattattataattatttaattttgaaatacacaaattattcttgagtcatttgtatttactatgtacattatattacttaaatattaagcataaggggaaatatatttatggctcaataacaagaacaggattcacttttgtatgtttcaaaggagatgggtaacccaggaaagcattatcttccattttttgttttaaattcacagtttgtgttaacatggggaaggaacattaacagttgtgcaagggcatgtataaaatgtatataaaaaatccatgtatataaaaaatccagagtttatctggataatccagccccctcaagtcttccacagaggacaaaataattgcaagacattgaagaccttgaattatatggaacattcatgttgaaactctcagataatcacttgtcgcttttgagttacctgtatggacagaaaatccttgtttttctatagattaccacgtcaccctatgaacagaccacaggcacctgcctaatacagatacacaggagctctttcaaaagcaactccacttaaaaaaggaaaaagtagggaggaaaggaattgtagcctcagttgagcttacccaaggccctggccataagcttcgttttcctagctgttggtaggtgtaaagttacctcaggaagagggctctttggtcctttgtctctaggtagtatttctcctgcattactcctgaccactgacaatcttgattaatgctaagtttttgagtatataacccaggctacagaaaaagggacaaatcaaatcaaaacagcataaacagaacaaattagaaaggcttttgttttttaaatatatttcaagatattgcttgtaggcctgtgtaaagtcagttttaagttttatcatattattttaaataatcttgtaattggtattcacttattaaggatattagaaattgttcagtgtaagctgcaagttaagagacctacattcaagtcttcactttgcaagcaacttgtcacaaatctttgggtaagtcatccagtctttctaggcttttctttcttccggtgacaattaaaagggttagactagaatgaacttgaaggttctattctgacattttgtgttggaaaggctcaattactgatcttccacatgttttaataaatattaataaaattcacacatttgcatactaccttgtagctcacaaagtactttcatatatatgatctcttttaaatctctccagtacctgtgagttaggaacgtttcataaaagcaagaaaactcagagaagttgcaacttatctaggatcacagaactactaaaatggcagagctggatagcaggtcttcctacttccaagctcaatttttccttctattatattcagctacttcaaggttatggtaatatgggagcatatttagttaagtttattgaagtgtaaagaaatatgacatcattaaaaaaacccaaatttctggatttaaagtcacagaactagatttcattgacagctctgtcactctgatttggggaattcattttgtctctccaagcctcagtttcctcatctataataaaaagaatttggactccatggatttgggcttcttctttgaaattctagtttttgggccgggagtggtggctcacccctgtaaccccagcactttgggaggcccaagcaggcagattacttgaggccaggagtttgaaacctgcctggccaacatggtgaaaccccgtctctactgaaaaaacaaaaattagtgaagtgtggtagtgcacggctgtaatcccagctacacgggaggctgagggatgagaatcgcttgaacccaggaggcagaggctgcagtgagctgagatcacgccactgcactccagcctgggcaacagagcgagactctgtctcaaaaataaataaataaataggttgggcgtggtggctcatgcctgtaattcccagactttgagaggcagaggcagagaccagcctggccaacgtggtgaaaccctgtctctactaaaaatacaaataattagctgagtgtggtggtacacgcctataaccccagctactcgggaggctgagacaggagaatcactggaacctgggaggtggaggttgcagtaagctgagatcatgccattgcactccagcctgggcgacagagtaagccttcatctcaaaaaataaataaataagtaaattcaaaaattaaataaataacaaaataaaataaataagtaaatacaataaaattatggttttctttttaaaaacagtgactatttctagattaataaatattaagtggaacctttttatggacgataagaggttaaagaaaaaagtagactacaaaattagtcctactggctactattcatgctctttggccactgggatattaaaaatcttgaactaatatgattgactgaactctactttccagcaaactagttaacctaagatttcacagaaggataaattattttagtggagttatgtagaaaatatatggagttgcattttctgaaaggccttgacttgagagaagaactttcttagaaatcaatgatagaaaaccaaagggacttactgtgaagacatttttggccctctgcaatgttctgattctctgccctctgacattgtcatgcatacttacaatcctgaaagttaataattggtagacattttattttaagataaagaaaaattacttgaaaatagtaaaggggatgatggtgagtgtttcaagagttagggacaaagaagagttttgaacctgctgctttttttgcccgcctccccatctgagtagaacattgcaacttttgaagctcacatagaatagatcataactagcttgctgagttggtgactttatgcacaattaagccttgttgggactttctttatttgtgatagtgctgttacagcgtgggatgctattcatttccaaacaacattccatttaataacgaggcattagttcacccattaaatcagggccatcactaactgataagcatcacccttttttttttttttttggcctcacttggctctcctgcccagcaaacaaagcatggcaacaacatggcccttgagatgtaaaggttggaggaagggtagattgaacaatgatgaccaaaattctatctagtcacagaaatctaacattcccctaggcttttcctttctttaaataagaactttttatttctaagcagtacttaaagtgccattacaaacaaagctaagcaaaaaaactaaataaataatagcaccaacttccacatctcttaaacattaaagagatgaaaatgtatggagggaaatgcaacagataggcacccaaaagataagaacaagaatgttaatagcagcattgcttacaataatcaaaactaaaaacagctcaatgtctatcaagagtagaatagataaataaattatggtatatttatgtaatagaaactcaagaaactatcactacacttgacaacatgaataaccctcacaaagctaatgttgtgagaaagaagccagactcaaaagagtgtgtaatgtatgatcccatctacctaaaggacaaaacttaggaaaattaatctctggtgttagaattcaggttacctttgggcaggagtaaggagaagagatttaggagagaatctgggaggtttctgagtactggtgattatctacttttttgtctgaatggtgaatacaagggtatgtacactcatcttttgcattcttttctgaatatactttatacttaaataaaaacttatttagaagttatctaggattaagaaaccactgttagactgaatttgagcattgagttgatgcttatcaaatcaatgaagtctcaccagcaaccataaacagatcagtcttatttacttattatattattttttaatccagttttaattttacaatagatttagatttacagaaaagttgcagtgaatagactgacatttacagaagaattgcaatgacaatacagagagttccatacatcactcatctagtttccccttattgttaagagctcatgttacaatagtatgtttattacaactaagaaatcagcactggtgtgttattattaaataaattctactcttcattctaatttcactagtttttctactaacgtcctttttctgttccaggatttcattcaaaatatcatattagattttttgaaaagataagtaaaatcgacaaaccattagccagactaagaaaaaatgagaaatgacccaaataaacaaaatcagagataaaaaaggagacattacaactgataccagaggaatataaagatcataagaaactattaggaacaatgatatgccaacaaatttggtaacccagaagaaatggataaatttctggacacatacaacctaccaatactgaatcatgaagctatagaaaatgtgaacaaatcagtaacaagtggcagattgaattagtataaaaggtctcctattaaagaaaagcccaggacatgatggctttacttctaccaaacatttaaataacaaattgcaattcttctcaaactcttccaaaaaactgaagagggggaaatactgccaaggtcattctatggggcaggcattaccctgatagcaaaatcaggcaaggacacaacaaaaaaacaaagcttataggccagtatccctgatgaatataaatgcaaaaatcttcaacaaaagagatcactaacgatggtcaagaaggattcatagcagacatgcaagaatgattcaacataaagcaaattaataaatgtgatacatcactttaacagaatgaaggacaaaaaccacattgatcatttcaatagatacagaaaaacatttgacacaattcgttatttttctctgataaaagctcaatgaattaggtataaaaggaatgtacttcagtacaataaaggccatatatgacaagtccccaacagctaatacactgaatagacaaaagttgaatgcttttcctctaagaaccagaacaagacaaggatgcccgctttctcacttctattcaacatagtactggcaatcctagctagagcagttaggtaagaaaaaaataaggcatctaaattgtatagaagttaaacggtccttgtttgcagatgatatgaccttatatatatagaaaaacctaaagactttactaaaaaaaactgttataataaatttagtaagtttgcaggatgtaaaatcaacatacaaaaatcagtagcatttctatacacagaaagcacactatttgaaaaagacatcaagaaaacaattccacttacaatgactacaaaaacaacccataaaataaaatacttaggaataaatttaaccaaggaggtgaaagatctgtacactcaaactataaaaccttgatgaaagaaattagagaagatgcaaaaaatggaaagatattctgtgtttatggattggaggaatagttaaaatgtccatacctacccaaagcaatctacatattcaatgcagtctctaacaatatatcaatgatgttcttcccagaaatagaaaaaaaaatcctaaaatttgtatggaaccacagaaaatcctggatagagaaaacaatgttgagcaaaaagaataaagctgaagtcatcacaatacgtcacttcaaaatatattacaaagctatagcaatcgaaacagcatggtagtggcataaaaacagacacattaactaatggaacagaatatagaggccagaaataaagccacacatctatggtcaattgctttttttacaaaaggtgccaagaacacacaatggagaaaggacagtctgttcaacagtgttggcaaaaactaatgtccacacgcagaaaaatgaaattagaaccttatctctcaccatatagaaaagtcaagtcaaaatggattaaaggcttaaatttaagacccaaaactatgaaacttctagaagaaagcatagggaaaagtctccatgacataagtctgggcaagatcttatctttttggttaagatctgaaacacataggcaacaaaagtgaaaatagacaaatgggataacatcaagcttaaaagcttctgcatagcaaaggaaacaatcaagtgaagagacaacccacagaatgggagaaaatatttgcaaactatttatttaacaagggattaataaccagaatattttatataaggagctcaaacaactcaataggaaagcaaaaacaaaaacaaaaacaaaaacaaataatccaattaaaaaatgggcagaagatctgaacaggcatttctcaaaagaagacatacaaatggccaactggtatatgaaaaaatgctccttatcactaatcatcagataaatgcaaatcaaaacaatgagatatctcaccccagtgagaatggcttttatcaaaaaaaaaaaaaaaaaaaaaaagccaggaacaaaagatactggtgagaatgtggagaaaggggaacccgtgtgcactgttggcaggaatgaatattactagagccactgtgaaaaactgtttgaagattcttcaaaaaactaaaaatagaactactatatgattcagcaattctactattgggtatagatccaacagaaaggaaatacatatatcaaagagatatctgcacttctatgtttattgcagcactatttacaatagccaagatttagaattgacctaagtgtccgcgcaacagatgaatggataaagaaaatggggtacatatacacaatagaatattattcagccataaaaccctccacaaaatccttttatttgcaacaaacatggatagaactggaggtcattatgatgagtgaaataagccaagcacagaaaggcaaataatgcatgttctcactcatatgtgggagttcagaaagtggatctcagagactgagaagtattgggggggtgggccatgggggagcaaggggaggtaaacatacacttagaagaaacatacacttagaagaaataagacccggtgttccatagatcagtagggtgactacagctaacatttatcaatagtacatgtcaaaatagccagaagagaacaatttgaatgttcctagcacaaagaaaagataaatatttaaggggatgagtaacccagttatgctgatttgattacagaaatgaatcaaattatcacatataccctgaaaatatgtacagctattatgcatcaaaaagttgaagaaaataaaaattttaatttttttgtatacaatgtatattgcatatcatatattgattctgttcatatataagtaaatatccttactggtttgcctcattggagcattcagacagcaaataatgtgtagttcaacattttattaaatattttccatcttagtggatattttgtaacaagataaatatgatgcaaactaaaaaaagtgccaagggcgggcgcggtggctcacggctgtaatcccagcactttaggaggctgaggcaggtggatcacaaggtcaggagatcaagaccatcctagccaatatggtgaaaccccgtctctactaaaaatacaaaatattagcttggcgcccttgtagtcccagctactcgggaggctgaggcaggagaatcgcttgaacctgggaggtggaggttgcagtgagccgagatcgcgccactgcactccagcctggcgacagagcgagactccgtctcaaaaaatacataaataaataaataaagtgccatactgaatctaccaaaaataaatcaaaatgagtaagagaggctgccagaccatcttcttcatcagaggtaatggtcagaggcttctgaacgttggtatggaaatgagcctgcaggcaggatttgtatgcagggaagaggaggtttgtaaactaggtgaattataccttcagagtgcatataatgtatattatacttttcctctacgtatgcgtaccagccgtattacctatgtatcatctgatccaccaagtctggactgaagaagtccttgtaggaccacactacacatggcgagccggtactcggaagggattattccgaagaggatttgtagacactacccgctgtgtatgacctaggccctttacacgggcaccactggagctaggaagccagcagaaagctcctccccctggcctgggagcgggctgtccgtaggacccagagcacctcccatgggagaaacgcccggctttgcttctggccccgccccgcctccctccaggccccgccccgcctccccggccccgccccaaccccgcggccccgcccctcctccccggctccgccccgcctccccgggcccgccgctcctcgcggcctccgcgtcttccttccgggtcgcgctaggccgggcttgcggcggttgtgccgcatctagagagtcggggagccgcccccgcacccaggccttctcgcgctgcctggtcgctggtgaagcccgcggcgcgcgcctctcccggaccctgcagggtacggcccttcctttacttctccctcccgtgggtctctgtcttcttcctttggcgccggggcggggccggggccgagccagcgcgcagctccgcgctttggggagtctggacgcctggcagaggcccccgctgcccgcccctccccgcccgcggccccgcgcccccgcgcctccgcttcacgcttgcggggcttgctggggcccttgagaactgctgacgtgcctcgggctctttctacgctacagtctgcctgcaggctgtgaggcgtcgttcggacgtgtgcgcggctcagggttgtttacaccgcgggggactgcgggtcgccccacacccgcgctcagtgctgcgccggcagccacgcgtcggccacatgcccgcctgtgcttgtgattcctgtgcctgctgccttgatttccctctgacatccgatggtttttgcctaaccaggcctgttttctttcttcaggactgctacagggtgcccagctacaaccttgtttctgtgtttaggtttaggggtgcccctagagtgtgatgatgaccatctacttggcctccttgtcgacatatttataacgggtggttttggatttccttgatttcccagtaatcattgccacaaaccttcgagatgcattcacagattgaaatacagtatacaaataactattatagaaggtgaagatggtataagcctgtggtcaggtagttgcgttggcaggatgcccgtctggctttgtgctccggagggcacattaccaccaggtgcagggatctctgcttgctttggtctgttcacagacacaagctgccttttctggttcttgcgtgcactccttggtttcttaagttcagctataggtatatatttttttctttcaggctcacttcctgcctccattatcctgtaccgcatattgtatctgttggttgagtagagagagattcatccagagtcatcagcgctccaatagtcctttatcagattaaggacttgagggaaatgtgcattatgctttagtaggcactctaaaagttccttgaattggattcttctttccatacttatgttctgagtactaactttgttttaaacttctgcgccaaaagttggcttttctgaactctgcattttcaaactcttcccttctgttatttgaaaatcagataagtcaactcattgtaagatggataatttctttactcacgccgtgatgaaataatgcgattatagtactctgtacaatggtacatatggtacttgcacatatggtcagttaacaaaaactgccccttctttctttactgtgttagtctcatcctcttaatgttgctgcggttaacattctcgatcttaacttcgcggatctaacacagtgtcctttaaaaaaggcctttatctacatgaattgtatataaatatccacctccgttttcttctagtattgttaatgatcttatttatatttaatgtgagataagaaggctctaactttataattttgttagtgactccatcatcatttgttggaattctatttttccctgctgatcagtcctataaataccataggccctaaattcccgtgtattcttgggactttctgaacggtctagtattctttggctccctgtggtgatcctggcttctgtgatgctcttattgctctaggtttataatgtgttttaatatctagggatttgaacgatgcctggcatattgtagacatcactaaatatttttgaaatgaacacatttagtgggggcaagttgattccctttctttacctcttgcctccctcccccctttaaaattttcctgccagttattgagattcatttattttagcttgctttttccatggtcagttgaatcattaactgttagtaaataaatcccttctgttgctcattcagaacttgcgactagagttgctccttacagttacatagagaagcagcctgattaaaaatctgcatgccttttgactttgcaccgtgtcatagtaactgtagtgtgtctctccccatcacctgtgatttaggatgttctgtacctggtttctaagagaaaaatggttatctaagagataaatggctgtagaagtgttccctgggatatgaggaagatatcctcatatccatttgtattttaccatcacaactggatatctaaaatataataaattttacactggacacttaaaactttattagcccatgaaataaatgtatgcattctttaaaaaagatcaagcaatacagaaatccttaaaggaggaagtgaaagtgctgtgtgcccacctacccagtaaccttgttccataaagatgatcactgcttgcagattttaaaaataaatatatttaagtctacttttgtttcataaatggcagtgtaccatctataattttctatagcttccacttaataataattgataaacatccttctgtgtcagtgcatataatagtatcttgtcttttttgtaagtcttttggtatttcattgtaggaataacccaaaagttatttagccagtcccctgttggcattattccaaatttattacaaacagaactgcaaggatcatttttgtgtttattctgtatactgtcatgtttgcatgttagttcatttcctaagatatggaattgctaggtcagaggctacacataagtgttaaattatgagagattctgccaaagtgctcctcaaaagttgttggtaagagtaaatttatacaatttgttaaaatattgcttttgccatatcacattgccaagaattgtcaaggatctgagatcataccctacttgcaagctaacagtttcatggaaactggcagaaaatatgagactcctgactcagagacaaagcacaacaggaacggtagccagaggatcatcttatgctgatttgctggaaccctgatttccacagggtgatgtgataagagcccagtgacactagcagatgaagtaggttatgttacaggagaggagtccttagtttagggaacctgaatctttcatagtgggctgcaaataaagctgtctgatctttgccagagagggagacattatctttattttcccacatggtaaacaaacctgccctctgtaccagagggagacatctctttatctgccaaggctatttgctatataaacaccactgaaaagataaaaaataaaggccgtcagtgcctctacttatatgatatgcagaaacttgagaggcctgctaagatgaaatgattattttttatatttagtaattttatggatgaaaaatgctattttattgttttagtattgcatttctttgcttattgatgaggttgactatctgtatgtttgttggtcatttgtattcgtttttacttgcatgatcatatcccttgcttaggtttctgttgaaatgttcctcttttctaattgatttgtaatagctctttacatattgtggctattaatgatttggttcaccatttgctagtattttctcatagtctattctttagtgtttcttggggcttttgctttataaaaatctttaatatttatgttgccagttctgctgttgttttcctttacggcctctgggtttccaccggaagattattaaaatactctttgtacacattctgttatcatagatatagatttttaaaaatggttgctatggcatactattacaaatttatttttccaaattgctggacattttcctaaaacatttattttgataaactgtcctttccctgttatttgatttgacacatttgttgtaagatactatatccttaatttgttgtttttctcaaagccaacaaattagtaagcaaagtatgttagatgtttactgtgattatgattttggttgaattcagccttaaagataatatgtgtaattgttcttagtggattttatcttaaagaatatgaagtatcttttttgccctgtttagtgattttttggctgggagtctacattgtcttatatgacttttgcctctctgtcagttttgtgtgtacctgataggtcttttttgtccatatgtttattatgtttattttcagtcattttacaccattttgctttacttgcctttcataaacatcaaacattcatgtaactgagctgaacttttatttctccctgaaatcttcccccttgccaatttggaagtttgtcttctttttttttttttttttttttgagacagagtcttgctctgtcacccatgctggagtgcagtggtgtaatgtgtaattttggctcactgcaacctccatctcctggacttaagtgatcctcctgcctcagcctctcaagtagcctggactgcaggtgcatgccacaatacctggctaatttttgtgttttttgtagagatggggcttcaccatgttgcccaggctggtctcaaactcctgggctcaagtgatccacccgccttggcctcccaacgtgctggggttacaggtgtgagccactgtgcccggcctggaattttgtcctttttttttttgttttacattttataaaacttttaaaaaagatcattgtagattcatatacagttgtaagaaataatacagagatctagatcctgtgtacattcacccagtttccacctatggtaacaccttgcataactacagtacaatattatactcaggaaattgacattgatacaatctatagaccttattcagatttcaccagttttacttgtacccatccctgtgcctgtttagttgtaagtaattttatgtagattcctgtgaacactaccacagtcagaatatacaacagttccatcacaaggttaccttgtacaaaattgggtttatctcttaataggacaatttaatctagtcatattaactattttttcccctctcctgcaagtttggaaattctgaaaccatctataactgactcttttttgccctcattcttcccattaataagttgagacctggatctcttgccttctttacattcttggttttattgatttgatttcttttctatagttgtaatattctgttcccacattgctataaagaaatacctgagactgggtaatttataaagtaaagaggtttaattggctcacagttccacaggctgtacaggaagcatggtgctgtcatctgctaggcttctgcgaggcctcaggaaatttacaatcattgtggcaggcaaagcaggagcaagggtcttacatggcaggagcagaaggaagagagtgggggatgcgctatatgctttgaaacaaaaagatctcttcagaactcatatgagaacaccactaggggcatagtgctaaaccatgagaaaccacccccatgatccaatcaccttccaggccccacctccagcactggggattacatttcactgttagattttgatgcagacacagatgcaaaccatatcagtagttcttctgtttgtttgtttttttctaaccattttttaaaattttgctagtatcgtatcacttagatttaactataaggtcactgttacttgaatagtatgtcttccctgtttttgaagtatttaattctgttgtttttttttttaactggcatacatttttaagtaatagtttcaggaagagttatgggaagtatacttgcatatctagaatattttttatttaattttgttttttctatgtgaataagagtttgagccattttttttttcctttagaatttccttgaacttaaattagcttcagtctttatcttatatagatgttaggtttcttgtatatgtgctctaggtcatttatttgtctcttaattttcaatttatttcagtcaccacctcttctaagaatttttttaagttagtttgtgcttatttcatggatcctataacctattaattaacactaaacaatgatttttaaaaaaaactattgtcctaattttggctttaacttttcctgaatgccatttgctgtaattgcttaacttgtttccctgtctttaaaatggttaattctattcagacatataaatgcagatctatgttgaccatcttggtcctggtctgaagtatttcatgtcatgaaggtcactattctgttttccagacaggtagtttcctaaggcaagatgagtggttggggctgtgtgagcaggctttgccctgggcagaacaagtgggcagaacatgccaactagtagatatctttaaagagaacagacaagtaagctagcgtgtgcataaccaaatcaatactagagtatcggatttacagcttgacttgttttgactgaaaacaaaagcacacagaacagttacatcatcctaaaaattccttgtgtggcccctttgtggttactttagtcaatttctctttcttcccttaaccctgggcaatcactgatttatctgcctttcctatttgccttttccaaagtatcacataaatgaaatcatacaatatgtagtttttgcatcagacctctgtcacttaacaaaatgcattttaagattcatctatattattgcctggattggtggttctttctttttttttttcctgagtagtaactcattgtatggatgtaacactgtacatgcatctgtcaaggacatcttagatgtttccaagttgcaacaattatgaataaatctgctataaacatttgtatacaggtttttggttggatgtaggttttcagtacacttgagtaaatacctcggaatgggattgctggatggtttggtaagggcggatggacctttataataaaccgtgaaactgtttttcaaagtggctatatgattttgcattcccactagaaatgtttgcagaatctaatttggtatcttaaaatttgattaatttgtagttaactcttcccaggtcttcccttaagagcaaatacttcccaggtctaagatgaaatactttctcagggtttactcttttgaaactgtacttgatcttgctcttcggtaatatgtttgctaggacatgtacaagtatcccataagagaaaaaaagatattttcaagtagatgaaaaggcaagcacagactgggagaaaacatttgcaaaaacatctgtctaacaaagaaattgtatctagtgtgtgtaaagaactcttacaactccatagtaaggaaacaacaacaaaaaaaagattagaaaatagacactgcactaaagaagatataaatggcaaataagcacgtgaaaagatgttccatgtcattaatcaattaagaaattcaaattaaaaccacagggtatcaccacccacccactagaatggatgaagattgacaatattaactattgatgaggatgtggagcaactggaactctcatatgttgatgtcagaatgtaaaatgctacagccactttggaaatggcttgatactagaaacaagccaaatgtttagcaacaactgaattgatataccaatgtagctgacccttgaacaacatgggtttggactgtgaagatatgcttatatgcagtttttttcaataaatatagaaaaattttggagatttgcaacaatttgaaaaacttgcaaattgtgtagcctagaaatatcaaaaaaaggtatttcacaaataaataaaatatatgtagatactagtctattttataatttactgccatgaatagcacacatatatattataaaaaattaaactttttcaaaaggtagtcacacacttacagaatgtacatgcttccatttgcagttcagagaaatgtaaacaaatgtaaattcagtattaaatcataactgcataaaattagctgtggtacatactgtactactgtaataatttgatgatcacctccagttactattgcagtgagcttaaatattgcaggtatcagcttccaatgctgtgtgaagctaatcatcgacacatgagcagtttgtctctagtaaattgtgtattacagtaagaagtgatttcttgtgattctcacgtatttttcatcatgcttagtgtaataccataaactttgaataacaccatgggacccttagaaagtgccactggtaatgtcggaagtgattccaagtagcagcgagaagtcatgacattacaagcaaaaatggaattgcttgttatgtaccatagattacagtctgcagctatggttacctgtcatttcaagataaacgaatccagcaaaaggaccactgtgaaaaaagaaaagagaatttatgtagctgttgctacaactataccagcaggtgcaaaaccttgcactttttgtgaaataccactttatctcatattgaaaatgcagttcttatgtgggtgcaggattgctataagaaagacatgcttgtagactctaatatgatttgagagaaagtgaagttaatgtatgacagcttaaagcaaaaagaaggtgaaggatagaaagctagagaatttaatgccagcaaaggatggtttgataattgtagaaagaagtttggctttatgtatgttaagataacaggaaagcagctgctactgttcaagaggcagcagatgatttcccagataccattaaaataattgaggagaaaggatatctgcttaaatgggattctttctctctctcatttcatttcgtttcgtttcatttcatctcccttcctccctccctcctgtcttgtcttttcctttctcttctctttttttttttttttttttttttttttgagacaaggtcttgctctgtcacccaggctgaagtgcaatggcatgatcacagcttactgtagccccagcctcctgaggtggaaacagtcctcccaaatagctaggattacaggtgcacaccaccacacttagctaattttttattttttatttttgtagaggcagggtctccctatgtttcttaggctggtcttaaactcctggtctccagtgatccttctgccttggcctcccaaagtactgggattacaggcatgagccgctgtgcccagcctcagtcaggttttgaatgcagacaaagtgccctattctggaaaaaaaaaatgccacaaaagacatttattattaaagaagtaaagcaagcaccaggatttaaggcaggaagggatagactaactctggtgttttgtgcaaatgtatctgggtttatgatcaagactgcttatttataaagctactaacccccagccttaaagggaaaaggtaaatgccagttatcagtcttttcgttatgtaacaggaaggcctggacaatcagagttctttttcttgattgatttcatcaatgctttgtccctgaagtcaggaagtattaataccttgctataagggactgccttttaaagttcttttggtatcagacaatgtccctggccacccagaactccacgagtttaacactgaaggtgtcgaagtatattccacatgtccccaaatgcaatgtccctaattcagcctccagatcagggggttgtaaggaactttaaggcttactatacatggtactctatggaaagaactgtgaactctatggatgagaacctcaacagagagaacctgtaagtttggaaggattacaccattgaatatgccattgttacagaaaaaactgtgaaggccatcaagactcaaacaataagaaaactaaagaaaactctaccaatagtgtacatgacttcacaggatatatgacagaaccaatcaaggaaatcatgaaagagattgtagatagggcaaaaaaaaaaaaaaaaaagggtgcagggggaggaggatgaagggtttcaagatatggatcttagagaaattcaagagctaatagactccacaccaaaggagttaacagaaaacaacttggtggagacgagtgtttctgaattagtgccagatgacgaggaagaagacataaaagaggcagtgccagaaaacaaattgacattagacaatttggcagaaagttccaattattctggacagttttgacttcttttacaacatggacccttctatgacatggacactgaaactaaagcaaatggtggaagaaggattggtactgtatagagatatttttggagaaatgaaatagcaaaaagtcaggcagaatttatagtatatttccacaaaattgcaccgagtgtgcctgcctctcctgcctctttttacacctcctccatcactttcaccctgtatcctgaaatggcaaggaccacccctcctcttcctcctcccttctcagcctactcaacatgaagatcagatcgaagacctttgtggtgattcactttcacttaatgagtagtcaatatattttctcttccttatgattttgttaacagtacttttctctagcttactttattataagcataaattatataacttacaaaatatgttaatcaactgtttatgttattggtaagccttctggtcgacagtagcctattagtaaagttttgggtgagtcaaaagttatattcagatttttttttttttttgagacgaagtcacccaggctggagtgcagtggcacaatctcggctcactgcaacctctgcctcccaggttcaagtgattctcctgcctcagcctcctgagtagttgggattataggtgtgtgccaccacaactgtttaatttttgtatttttagtagagacagggtttttccctattggccaggctggtctcaaactcctgacctctggtgatccacctgcctcagtttcccaaaatgctgggattacaggcatgagccactattccagcctatattcagatttttttactgcatagggggtcagtgccccaatcccatacattgttcaagggtcaactgtataatgggatttgattcagaataaaaaggaactgaactactcttaacacatagcatcatgggtaaatctggaagatagactgaacaaaataagctagacacaaaataatacagttgatcctcaaacaacatgaaggttaggggtgccaatcccccatgcagttgatccagctataattttttactccccataagcttaactaccactgaatagcctatggttgactggaagccttactgataacatatacagttggttaatatatgttttatatgttatatgtattgtatactgtattcttacaatgaaataggctagagaaagaaaatattaagaaaatcatgaggaaaagaaaatatatttactcctcattaagtggaaataggtcatcataaaggtattcatcctcattgtcgtcatgttaaatagactaagagggaggaagaggatgggtcagtcttgctgtttcagagatcgcagagacagaagaaaaggcacatataagtggacccacacagttcaaacctgtgttaagggttagccatacataccatattatttcactttcatataattctggaataaaggacaatctggtttgtagtgacagaaagcagatcagtttttgcttggcataggttgtggatgggtgattgaccagggatccttttaggctagtggtaatattctgtatcttgattttggtggtggttatgttggtttctgtcattgtcaaaactcatcaaattatatgcttaaagtggggtacattttatactaaagttaatttaacagtattacaccattttaattagttgctattttagctataatggcaagctatgacaggtgtattgtccttggatttttgtttggcagggtgtaaatccactatatttttttctaggtaaaatgttctctatgttaatgtacaaaaatatatggctagtatttggctaaagtaaattcacataattagtatgactttaacaaacaaaatatcattttttctttcttcagtaagttccttaaatttatcctcagccagatatctccaatttttaatattttagttaaatatcattgcatatctgctaaagatttagggttattccagagtcacagttcttctcattcagatgccttattctttttttttttttgagacggagtctcgctctgtcgcccaggccagactgcggactgcagtggcgcaatctcggctcactgcaagctccgcttcccgggttcacgccattctcctgcctcagcctcccgagtagctgggactacaggcgcccgccaccgcgcccggctaattttttgtatttttagtagagacggggtttcaccttgttagccaggatggtctcgatctcctgacctcatgatccacccgcctcggcctcccaaagtgctgggattacaggcgtgagccaccgcgcccggcccagatggcttattcttacccatcgttaaacactgaagaaaaaggtaatatataggtaatataacagtggaatctatttctaagttatgttgtatcatcgtacctgtgtaattagaaacatatcctttcttttcactttgtgagatagcatgttgggcaggaagagggtttccagatccattatatcagaaaaaaaaaaaacaaaaaaccattccactcatcctatagctctacttaaaaaaaaaaaaaagattccttcagttcctttttctgcttttcttgctactaaagattgattatgaaatatttcagaagtttagatatgcttgttaaagaaagtctaggaaagaaagaacatattctgcagaagtaacctttctcaattcctagtttaaattggttctaaatcttatctcttgttttctgataaattcattcctacttgacttcttgggtacctcttgcttagttcctgccctttattcattaactcaccagaggtttttgcacagtctaatgtattccagactttttggattatttccttgcatttttgagatctaccttgattcctcgaagagagtggtactgtttacctctggtttttgagatttttgctctgcttttagatttttcttcctggcctggttcccttgccttctccatttgcttcattcgcttggattttcaagaagctttgaagctggataggagtctccagtcttcctcttgatccatatgtttcaggtaagaacgccacctattttttctactttggggccttactgattaaaaaatacagtcataataaaaatgttttaactggggaagaatttacttagagtaagagagaggcatataaagccttaagataccatcctgagtagtttccatgctgacactgttagattttttcaatgttagttttttaagatctagtacaattagaatatcaataattatgatgaagaaaaagcagagctttttctaatgcttggcctttgctcctttatatcacatctaatacgagaacaatattaagctgtcttattacctttgctgttatattacggcctgtctcttctgtctctctctctcttttttttttttgagacggagtctcactctgttgctcaggttggagtgcagtggtgcgatcttggctcactgcaacctccgcctcccgggttcaagccattctccgcctcttctctcttaacttgtaggttatctctttaagaaattctttttcagccatagtttttccagttctccataatcaacgtactgttttaacacagatttggagtgcaaaaacatcattgtatttgaggaaatggctttcttttacctctctaatcatctctttcatgaatctttctttaatttcaatcagagtttctttgtgaccagagtcaagactcttttatgtattcagaagctgcttttgtactaacagaagttactacttttttcattctctttgaacagtaaaatttcaatatatgtactattccttcttggatggcttcaaagaagttcatacatttgattcttacctattgcgcttcaatttttattacccgtttcctctctttatctctgtatcaagatatggaacatttcttgtgtcattttttggtttacatgtgccttaggaagagttgctggtttcatctctgtgtttattttaaacttattcattttaattctcttatgccatctactcttccagtctccgtaaaacaacagatgtttattgagcatatattggcatgtgctagactctaagggtatggttataattaaggcatgttctccgaacttggggagttcatagtctattcaggtagagaaatatttcagcatgtaagaaatagcaaataatacgaacatataagagcagaggaaaggtgcatggtagataaagtatgaacctgaccttgaaggatgagtaagagagtgccaagcattggaagagagggggcattccagagccatccagcctcagttgaagatttcaggatgctgaggcatgaaagcaggagtgctgctgagggcatggtggaggttctggtgggtctacagcaagggtagtgggtgtggacatgaaagggaaggggaaggcgggctcaaagttagatagaatgttcttgtatatcatgttatcaaaaagacagccttcctttaatggtacctctgtgtatatgagaagaattaggaagaagaaaacctgggaggagactgagaagttaccagaggcaagagggggcataagagcacaagttggtgtaaaagctagagggggccagccaggaaagagagctgataggaatttcagatgctacatcaaattcacattatcattcccctcttttctccattgatgctttctttcattcccctgttttgatttctagattcaaccagaaaagtccttcctcagaatagtatgtcttgatcagtttcagcaggattcagaaataatgagcatttaagggttggccttttttcttgattcattaccacattgagcattctaattacattttggtactatgtagcaaagctgtctaaacttgctttttttttttttttctatgacttcattgacatgtctctgtgggctcttttgcaagtaaatattgtgttacaatttgccttgtatgtatgcctgtgccttattgcctgtcctttttgtgtttttccatgttttttcactgtagtataacttgagaataatcctcttttgagttttaaacttgttttcaggttctttcatctcactgtgaacctagcctttacgctgtcctggctctggttcattctgattgctgcctttgttattttattaacagtccttttccttcctctttttcccttcgaagtacaagccgacttctcggcagctcctgccatcctgcttctctccgcctcatcgattccccatctcacttcaaatctcagtaggaaacatatgttctcccttgtctatacctcttaatttctcttttccactattactgctttctctgtaattgtattatttaacttcgttaagcattttataatatggaagatgtggtttaaacctaagttgtattataataaaatcatgttgtataaaagcaagttgtttcctaaggagtatgaaagtctcatgatacaagttaaaatggctgttgttttggtattccttgattgtgctagtataaatgttcagtgtagagaatttctcacttcatagtcattgcttatcagtgattggattaagcaacaaatgaaatgaagatccccctaattctgacttattctaaatggaaaataatatttttatatgttgtgagtccttaaagtagctttttgaatgaacaaaaaaagaaaatgtctcccagaagatccattttataatcactcttttggacaaattaagtgttcctgactaatatttatttatttgcaccaggtgggaaaaataattttatctttgaatcccattctccttataaaatagagttattgtatcttttacacttggttcattgcccatagggatattcattggttaccacaaattgcctccatgccttggcaaaagtccagacagcgcctggacaatttggacttctgcattggtcgtagctctccacatgagtcctgagacaatggctccattccctttttcagcttcatttcccagggaaaagtagagagagctatcctttcttctccatatgttcttccccacccctaaaacacttttatgtgtcatcttagcagattggaaaggagtttagaatcaatgaaggacgttagcaatgggtttgtacatttctcttttttatttctatgccttgcttattttcaaaaacaggttttaacttctataacattttccaaatagcactgctggaaaaagaataaatatatttgcttttttggtatatcagactctgcatttccttcctttaaaaatttcttttgccatttttaactttatttcctgaaaaaattagcattaaatattatttttatccatagttgaaaaaaactaaagcatccattttacatttctatattgaagaagtttgaacatataacacatatatttacagtttataactcacttttacatatgttgcctcaatgcaaaattttgcttaactttaacacagcttaaacataatattgcccatatgacagtcttgcttttgatattatcttataatctacaatggtaaaagctgggaaacagtttcaaagtttgtagcttggtatgtcaaacagaatttgactttcacaatttgtctaaaatctttttgccaaaaatgcacaacacagttttataaagaaagggggaggagcttagttgaagcaatttatagaccgtggagtgagaagtgatgtccagagattaagcagtcaacttattcatccactgtggcagatggttttctgtccttcccttgatggtttccaggaataacacatccatagtcttctaaattagctgatttgtcaattgatttgaatacatgttataggttgttctttatttcctaaattttatttttgcagtttaacttgttaattctttttctttttgaaaagagaatagtcaacttctttggaaaatggttcttaatttatctgcagccctattttgaaataaagtgtatatggtaaaagaaagatttgtaccatttcaattttttttgttaaggattgagacttgaatggcaaaaagttgtctgtctgtttttgagacggggtcttgctctgtggtccaggctggagtacagtgacacgatcatgactcacttcagccttgaacttctgagctcaagttatcctccagcctcagccttaaatatatatattttttaatttgacaaatttatacttgtggtaggtgaaatgtttgaataaagaagtaatataacaggtagttatttttcccccaattataacatgacatacttcagtacttgctattatatgtcctgaggtgaatctggttcattgactcatgagcacatccattaagtgtgtgttacagaaacaccttatttatttatttgtttgtttgagacagggtctggctctgtcacccaggctggagtgcagtggtgcaatctcggctcactgcaacttccgccccggcgggctcaagtgattctcccacctgggcctcccaaagtgctgggattacaggtgtgagccatcatgcccagcctatttattttaatatatgctttgttgcccttctttggaaaaagtcttattctggttattctgttatttcttgttcttgtgctgcaaatccctccatttggtgagtccactgactatctctcatcatggttcattttctattctggtctgtaactttttactgtgatgcatcattagtaaaggtttagtctgttgtatgttttggaagcattcctgcaaagagttttcacatttgctcttaccaggtcctaaagttttaccagttcaggactacttttcttttttcagtttttggcatgaggatagggtgggattctaaaccatgaaggttgtgtgaatttaggcccacactctatgcatggttcatgcctcatatggttctgatttcctctggtgactttccccccattgccttagttgatgtcatgcctacttgggtttcctggccagtaagctaagtttttatagtcctggtttcatggatagggtgatcctttcagagttttgactttatgaaggtccttccaactgtgacctgtgtctttaaataacgtctctgaatgggtgttagggagtccccttgtaaccattatggcctgtaactggttccatgagtcatgttagcttcagcccctgacctctgttcattgactttcttttttctgctcattgactttctttctttcttttttttttttttttgagacggagtttttctcttgttgcccaggctggagtgcaatggcatgatcttggctcactgcaatctccacctcttggattcaagcgattctcctgcctcactctcccgagtagctgggattacagtcatgtgccaccatgcctggctaattttatatttttagtagagacggggtttctctgtgttggtcaagctggtttcaaactcctgacctcaggtgatccacctgcctcagcctcccaaagtgctgggattacaggcgtgagccaccatgcccagctaactttcttcttagtttcttactactgtggattctctgcacttctttcaagttcagttatttaagtagtgtttcagtgcttatatttttaaatatttcattgtgtttggatctgtttgggtttgagaggcaaaaggatgctgttatacaatttaaaattattttagatttttataatttttaatttgctcatcacctatcaacatgtcaaatattttgtgcctattatgtactgtgtactttgagaaataaagatctttggctagattccctccttcaagagacttattcctaatataaaccctagtggaactaaggtatatatctcataaaaatgcagtgccagtaggtatcagaaagtaaggctactgatgtggaaaaaagtggttggaaaagaaatgatagaggaagcgagacttaacgtaaaatacgaagagtggttagaacttgattgggtttgctgggttagacaagaagagattggtccagcttgaagagagccttaaaataccaaaccaaataatttagattatatcttgcagataagaaaaaggcattggaggtttttcagtggaagggacatttagtgcaaataatgttttataatcttagtgctgaagttttggaagactagtgcattgctctattaaagaaaagttggggcagggcgtggtggcttacacctgtaatcccagcactttgggaggccgaggcaggcagatcacctgaggtcaggagttcgagatcagccttgctaacatggtgaaaccctgtttctactaaaactacaaaaaattagctgggcatgatggtgtatgcctgtagtcccagctactcaggaggatgaggcatgagaatcgcttgaaaccaggaggcagaggttacagtgagccgagattgcgccagggcactccagcctgggcggcaagagagacaccctgtctcgaaaaaaaaaaaagaaaagttggtacatctcccttcttagaagttaaactcaagactttacaggtacaaaaataagtttgttttatagttccttgttgtcaacaaaagtttacctactcaatgaggatgggccccagcctatgttgtaaatgagtggagctggctgggaacgagagtggccactgagagagctcatgcctcttgggatcttgttgattgttaaaggttacaaactagatcaaatttttaaaaaacactgtttggcctcagtgaaatatgtatacaaacatagtttgaaacaaaagctgtgagtttgcaacctctttatagatagcgttcattattaaatctttattatattctatcataacatttaaaaaatacattatttaaaattgtgtacaaaatagaaaaatgtggcctgtttgatttgaagggttgaataagtggctatttataattttggatattttgactttgtgacttggacataaaaatattttccaaaactcttttcttacaggtaaaagaatgtcacatgtcagcatttgtacctgaagtcagcatgcaaagttcagggtacctggatgaatgccaacttttgcatttcccatgtgtatcctgtgaccattctatctggggtgagtgatttctaagagtagctggcaacaaaccagatgccagccagccatggactgccctaacaaataatgctaggagttataaattaaacactgatctgtgatctgtgatgtgtaaggcagttaatgtagttcatctggattaactgtcagcaccaaagaactatattcccataatgtgaaatctgaattctgtatgtttgaaagagagtaataattaacagtagggaatttttgttaacatgtaaaattacagcaatgtctaagattattttgaatttacagcagtattttagtggttcaccatataatttaaataattttaattttcagattcaaagacttagtatttcttgagtgatggttataattttgtataaaatacggctttttggattgtatatcttccaattgccttataatatagttttgcttcccatattgtatgcataacaatatttaggtttcttaaaaatacattagaaaatttatttataccagacttcacatttgtattttaaaacttgtttttttagtttcattctgagaaattacattgagggtagagcctgttcattaccttatccatgcatttttctgcttatttaaattattttacttcaccaagccattcatttttttagaacatccttcaaagagttcatgcatcttactgaggacacctgaccttttgaagcttcataattcacatctagatgtcaccggtctttcccatgttaacagttctgaccatgttttattatatatgccttcggcgccgagccaggacagctacaagaggagaaatgatgaacacccatagagctatagaatcaaacagccagacttcccctctcaatgcagaggtagtccagtatgccaaagaagtagtggatttcagttcccattatggaagtgagaatagtatgtcctatactatgtggaatttggctggtgtaccaaatgtattcccaagttctggtgactttactcagacagctgtgtttcgaacttatgggacatggtgggatcagtgtcctagtgcttccttgccattcaagaggacgccacctaattttcagagccaggactatgtggaacttacttttgaacaacaggtgtatcctacagctgtacatgttctagaaacctatcatcccggagcagtcattagaattctcgcttgttctgcaaatccttattccccaaatccaccagctgaagtaaggtaagactaattttttaatgacctaagttatatggtagaaaggttttggttgttaatattggagatcttttttattgcaagcattcttttaagtaacttaattgaatttgattttgaaaattttccttagttttctgatggggaagagagatcactcatataaagatttaattcaggctttatacctgtaatacctcatactgtaatattcatggcttatgatatttgtatctcataaaatttaccaaaaccaaaaagcacaatttgaactcatagggacatgggccattctgggacgttagtacgaaatatgactttgaaaatattttcaaacaggcatcatgttactacttttaaatcttttcaacaactcacaataggcctgtgagtgacacttcagaggaggtccttaggggatttggtttaacgttagttgaatgtttttgcaacacccatattcatttaaaaatcaatgttgctttaagtaattcatgcattctccctacaagcctgttttgcataacagctccttggctgtcgtttttgtcattcaacctcctaattttacaaaatattaatataatgcagtctcacatgtaccctgttctccatgtgcctaggacccattcctccctcgaagaaaccacttttatcagctcattttgtatctttccagaatttctttgtgcagacacaagcaaatacaaatataattttatatttttatacacaaaagtaagcatatttatcacactgttctgtaccttgtttcacacagtagtatatgttggatcttttcttgtaagtacaaagagagcttcctcattctttcctgcatttgcaagtaatgcatagtgtgtatgaaccccaacttattaactagtcccccattgatgggcacttagttgtttctagtcttttgctcttataaacattaatgcagggaatgaccttatcataagtcactttgcatgtgtgcaagtatatctgtgggataaatttcctagaagaaggctactcaaccaaggataatttgataattttgtaatgtttaacattttttttttgcattttaacaatttattcttagttacatttaattttaatttttaacagttgtaattttcatatgtaatgccaaatttctctccaaagagtctgtactatttatattcccactagcagggcatgtacatgggtgttttgccaaagcctcgcctacagagtatgtttataaatttcaatatttttgcaatttaataggtgaaaaatgttatctcatgttaactgttaaaattcttttattatctctgaggttgaaatcttttcatatgtttaaaagccatttatatttctttttcctttaactatctgatcatattatttgctcattttttctattactcatggatcttagcagtttctaggacttcatatcactttattaaatcactcgttcattaaatattttagtgcctacctaatgtgctaggtgttgttctaggtattagagatgtgtcagcgagcagtgaacaaaataaataaaaattcccgctctcattctagcctgagagcagatcagggcacctgttcaactgtagggatggccagctgccagtgcaggaggaggcgggcagaggtcagctgctacctccgtaacatgcagctcctctgatatctctgtcccctcatctctaagggaatacttccagggcctgccagaaaacatacagagtacagctcaacttggagattgctggtataatctttacttttttttccagaactacctaataattcattgcaaataatgttattagtcgttttttaaactcagaaagccagcataccttaattaaaatcagatttttgttttctccctaagaggaaaaaatggagtaggatcttttgttttgttttgagacagggtctcactctgtcgcccaggctggagtgtagtggcacgatcttggctcactgcaacctctgcctctcgggttaatgagattctcctgcctcagccacctgagcggctgggattacaggtgcgtgccaccatgcctggctaatttttgtatttttaatagagatggggtttcaccaggttgggcaggctggtctcgaactcttgacctcaggtgatccgcctgcctcggcctcccaaagtgctggaattacagatgggagccactgtgcatggcaggatcttttcttatatgagaattgttttattaggactctgacattcttcttacaaagttacctacttttttccaaaaatctgaaaagatttagggaggagatcaatggaacatgtaatgtgttttctccagtctaaaacttaacagctgcataactaattttaagtacaaatcatgctcttgggttactgagagttactggtatatggttgtgattaaagttaaaactttatttatacctgtatctctaattttctttactgattttcagctttagtctactgaaaataccattacattttaagagaaaaaaaggtgaccaatatattattaagatataagaaaaagcctttttaaattttactgattatgaaatcaatagatgtttcattgtttaaaaataatctagaaaataccaaaaaaaaaggaaaatatatatgaaaaaaatctgtaattcttctgcccagattcagtaactgttaacatttgggtgaattttttatacaatcagaaacatttattgaacaccctctctgccagttcactgctaggaaccaagtagagagtcagacagagatggctcttttttgagcttacaggccagcctagaagaggaccatgaggaacatgtattggcagaggggagaacctaatctgtgggctcagagaaggcttccctggggaagtgacttacctgggacctgagggttgagtgaggctccagtgtggataggaaaggaggagagacaacagcacatttgaacgtgagatcatgagctaagatcatggtgtttgaagaagtgagaaaagtccaagaatgcagagaataagctgttggcaactggagacatgggagtaacattcttaagatctaaactaggggtttctagactttgggattttatagatttttttggatccagcttcccagaagaatatcttgaggtgactattcctgtgcaatttttatggaaatttttgtggaaatttttttatgaagatactctaggagaagctagtaaaggagtagggaaagcatgatgggaaaaatcaagcaaggatgcaatatcatgtgaagtcccagtctgctgggaggcaaagttgctagagagctgggcccttatactcctgcaccagccagacttttaccatgggctggaagggtgggaaagggggactgtcaatcttctaggcacatgtcactccctagatgaagcccaaggtagttctgtgaagaaggttgtaagtgtaaacccttaggagcaaagcaagcccatctgcagggtggcacatagaactgatgagatgggggatgtgcatgtgaatggagttcaggtgggaggagtcagtcacaataaactagtaacataataatcatcataaaaattagggaactcatagacttgtcagattatttactttgctaaattaacatacagtaaaaagacaaacaaaatgccaatgttacctgtcatcaccattatttcataaaagtttatgcatctgttcaaaaaaaattaaccagtgaagagcttggtcaattctgagttaaatgacaaaatcatgttttttggcccacaaagtcgaaaggacaagatcatgacaaatttgtgaaatgattactcaagcaactcagtttataccaagaaatcagcatgatcagaatcttgaataaagatttctttcaatgttataagaacatatatgtgtgataggtgcatactaaatgtgcattctcacatttagtgatggaaaactccgtcatgtactactgtttgggaacccagtgggctacagtgtctattattttaattttatatccctcccttaggagttaacaaacaagaatgtgttggagtagctcaggaatttgcaggaaattgacttcttttagtcccagaacatttaaaatttaaaaccagtcttttcctatttcatgtgattgcatttctttgttcagtaaatgaagtggagaagttacaggtagttctaccagatcttaaagtctcctcatttcttgcctagtaccttattaagagcaaaagaaaaaggcctggcatggtggctcacgcctgtaatcccagcactttgggaggccgaggggggcggataacaaggtcaagcgtttgagaccagcctggccaacatggtgaaaccccgtctctactaaaaacacaaaaattagccaggcgtggtggcgggcacctgtaattccagctattcgggaggctgaggcgggagaatcacttgaaaccagaaggcggaggttgcaggttttatagagtgccctagtcctgtgaataatatcttaatggatgcttatgtaagactcagaaaataggctagctcagggttaccatttggaagagagagacaaggaaacggggaagaagaagatgacaaatagaggtcagattaaagaaaccaattggaataaagttatttgggaatgaaatttaatgatgtggaattttttttcagtgttcaaagcactccaactatataatattgaaattaagaaagcagggagaaaaaaagaggctttcatagaatttgctaccaaatccagttgcttaagtaacgatttcacaaatttgtcatgacctggaccttggtcatgtgggccaagaaacatgagtttgtcatttaactcagaattgaccaagctcttcactggttaattctttttttaagcacatgctagtttattagtttccaattagagatgggctgggaggcagggagtgaatagatagacctgtcagaatacttgttacttttatttctgttttcctattattccttcactttcagctagtgaaatggaacagggttggcaagataactttctttgctggctactagatatacttactggctaggataaattttggttgcaaggaagctttttgtactcatctgcctggcttcaagcctgaatacaggttagaaaacttgctttctttggtttccattaatgaaacatctctcttcctctcatctacccactgcttcctggttgccctggagaaagtttcttagtggtataacaggtcagcagtcatagagtggtttgtttctgagcactggacacatagtagtcatccagtacaatcaacagaaagaacattaaatgggctgtgttagttactatcccagaattgaatgctccagatgcagactgtaagcccagtctcaaagacattccaggctgaattttgcacatgtgatacttgagatttaaaatacttaaagagtacattagagtttgtcagatttgtccagtaaataaatacagtgtatgagaataatattaaacatgtaaatgtactattacaaaagccatgacttaaaggagtttaatcatatcaacactgccctggggctagagaattaaaagagttgagctttctccagaatgtgtgtgtgtgtgtgtgtgtgtgtgtgtgtgtgtgtatgtgtgtgtacccatatgtacatgtgcgtatgtttatgtttgttttcttgttttcactgactagtttttattattctggctttagttttccagaataaaaagaaattctcatattctcttgttgggtaagatagatacctttctcattttaacttagaaatgatacattttagctctattggggaattttaaacaaaaaccttaatgcaggtagcagaaaatctatttgtattggtctcatagttaattcaaataatttttctgtctttttttttcttgttactttttaggttatcaagaaaaataaaagtaaaatatagaaactaatgatttacttggaaatttttaatatttagacatatttttaaatctttctaaaaacagatacaatcctgatattccactttaagtataatttttgcagattctgatatatatgtaactaaataatctttatgcgatatagaagtcagaagcaagaatgatgctaaaataacattaatcctaatatgtttaaacatgctagaaatgttaaggaagtcagtgtaaagcatcatcttaaccctgtctgttttgcatgttctgcaaggtagctagagaggactttttgtagattaatgcattattaaaattgaatatttatgttctaatcaatgtctttatgtttatatttataatttttaatttgatttacattataatgcatttcaaattatacatgaagacctgtattgtgtgcatatttatttattgctaagaacttggcagaggttatttctttattatattttcagtgttcttcttaagcctcccaaaactccccattgaaactaaacaacaaagtaggctggtttagttcacatgtgctgtaaaccagtataggtggttatttcacagggtcttgaggggtccttgtttcttggagatgttcctccagcatcgtctggtgtcaatttgcagtggcgacaaaaaagtaagactaaaatttgaatttcttcatgtattctataatttactctgtgattcttggaaataaggtatccaaaattaggcatacattttctcaccagcattgttttagatgtttcatgcttctgttccctagcacctatatggctagctctgttttgctgcatgtatttacattagagtattcaaatcaattccttcgttaggaacccttgattttagcagttaatctctagggacattcttaggttcaggatggcattccaggtttgcttttctgtcttgtcaccagaagaagatacccagcctgcttctctttcctcattaaacctgccacagcctgctctattctttggaactctttccctgccttgcaagattggttatagggtgtaactaatttatccattgctactttaatgttgcctctgaatacaaatactcacaggctgtttatgtttgatggattttattcctacatttcaggagagaatcagcaaaaataacaagtatgggattttaaaggttctagaaactgtaataaaagtccctactgctaaagttccctattctgtggttcctgattcccttcgtgatatgtttattagaattcctttggagtttgcttttattcctgaaggtagaaattgccatacttccctctccattcttccaagattgtggctgtatgcttttcttggtcccttctgggcctaaaaacagtaggagtacctatatgttgatggcttctataattttggctctgatttctcccttgagtttcacattttttttttctttcagtttcttctatgcgttgccattatcagtttttacttagatctcagtaggtcattgggccagggaaataaacgaacaatttattggtggaaaaaaatctcatatgattaatgaatatataaaaaaattaagtgccattagtaatcagtgaattacaaattacatcataaggagatatggctcactatgaaactagagattatttttaatgctttcagtgatcattcttatgtactattggcataagcttttttgaaagcaatttgtagtgtgtattgagagacttaaaaatattcttattctttgatgtaaaatctttattaaaaaattttactagcaaaagtaaataattaggaatagagaaaaggtgataattgaagtatttttaaatgtttctaattttctctttattagaaataatattagagaaatagttaactgacatatgagtatattaagtacctgatgatgctattattatgaagaatctttaaataattttggaaaatagttttataagaagacttatctggagatggaatataagttaggccttgaagaatagatatgcagataatagtaggttgggcatttcatggggaggaagataacacgagcaaagacataaaggtggaaataagtttattgcatggaaaataatgattaatctggctgggaagcaggagttcatttggaggaataggagaatgttattccccttttatgtctttagatatttgctagatactaaggatataaggataacttaaatatagcaaaaatggaaattcaggagaagggcatatacaagaaacagtttcttgaaaaatttgatgaaacaatgatttgataaaataaagagaaaaagataatatgaaagttttgcatttatatgaggctagtgacagaaatggaaaagctgaagcaggagacctttgtgaagcaaaatgatcagtttagtttccgcagttggtttaagccatgcacacagggagcttcatctttgtgtgttttattctttgggtttacttatcttgtaaactgtaatgttgttcagatacctctaactacatgttccagtttttaaactgatcaatgtgaaatctgtaaaaaaggactgtttggggacttataaaaataaattaataaggtctgtggcatttggttttttaaagttttttatatcttgggaacaatacttatattggattctatttattttgatgactttgtttcacactgtgacatattgggcatgggtctataaccttaagggaccagtagatctcattctaaactgtattatagggaagtttctttttttggcagatgggagattctttggtcagagagacctacgaaggtgaatgcttcccaagctcgccagtttaaaccttgtattaagcagataaatttccccacaaatcttatacgactggaagtaaatagttctcttctggaatattacactgaattagatgcagttgtgctacatggtgtgaaggacaagccagtgctttctctcaagacttcacttattgacatgaatgatatagaagatgatgcctatgcagaaaaggatggttgtggaatggacagtcttaacaaaaagtttagcagtgctgtcctcggggaagggccaaataatgggtattttgataaactaccttatgaggtaagccaaaaatatttagcagcagtattggatataacactatagatttttaatctttagatattaatgtttactgagcatcggtaattgagcattggtaagttatatataatttgatgtgttgtatattttgattttggaaaaactagacaaaatcatgttttaactaatttcactgcttttgttttggtttggcattagtgtttctgggtaaactattaagtatatattttcatattgctaattaataataaccaaatacaaaaaccagtaataagtaacaatccactttaattcatattacactttaactgtgggcaatacatgcttaactttttattagttatgttaaagatgatttgctattaaaaataagaatattaataagattgtgagatgaatgcttattctgtttaatctgtagtttctctaagtgtcattttttttctatactaactctattctatattctcctaactgtaatttttggtctaggcaggtagtgctattaccttggaattattaatacttttttttttttttagtttttttttaattatactttaagttttagggtacatgtgcacaatgtgcaggttagttacatatgtatacatgtgccatgctggtgtgctgcacccatcaactcgtcatttagcattaggtatatctcctaatgctatccctccccactcgccccaccccacaacagtccccagagcgtgatgttccccttcctgtgtccatgtgttctcattgttcaattcccacctatgagtgagaacatgcggtgtttggtttttttgtccttgtgatagtttactgagaatgatgatttccaatttcatccatgtccctacaaaggacatgaactcatcattttttatggctgcatagtattccatggtgtatatgtgccacattttcttaatccagtctatcattgttggacatttgggttggttccaagtctttgctattgtgaatagtgcctcaataaacatacgtgtgcatgtgtctttctagcagcatgatttattgtcctttgggtatatacccagtaatgggatggctgggtcaaatggtatttctacttgtagatccctgaggaatcgccacactgacttccacaatggttgaactagtttacagtcccaccaacagtgtaaaagtgttcctatttctccacatcctctccagcacctgttgtttcctgactttttaatgattgccattctaactggtgtgagatggtatctcattgtggttttgatttgcgtttctctgatggccagtgatgatgagcattttttcatgtgtcttttggctgcataaatgtcttcttttgagaagtgtctgttcatatccttcacccactttttgatggggttgtttttttcttgtcaatttgtttgagttcattgtagattctggatattagcccttagtcagatgagtaggttgcgaaaattttctcccattttgtaggttgcctgttcactctgatggtagtttcttttgctgtgcagaagctctttagtttaattagatcccatttgtcaattttggcttttgttgccattgcttttggtgttttagacatgaagtcctttcccatgtctatgtcctgaatggtaatgcctaggtttccttctaaggtttttatggttttaggtctaacgtttatgtctttaatccatcttgaattaatttttgaataaggtgtaaggaagggatccagtttcagctttctacatatggctagccagttttcccagcaccatttattaaatagggaatcctttccccattgcttgtttttctcaggtttgtcaaagatcagatagttgtagatatgtggcgttatttctgagggctctgttctgttccattgatctatatctctgttttggtaccagtaccatgctgttttggttactgtagccttgtagtatagtttgaagtcaggtagcatgatgcctccagctttgttcttttggcttaggattgacttggtgatgtgggctcttttttgtttccatatgaactttaaagtagttttttccaattctgtgaagaaattcattggtagcttgatggggatggcattgaatctataaattaccttgggcagtatggccattttcacgatattgattcttcctacccatgagcatggaatgttcttccatttgtttgtatcctcttttatttccttgagcagtggtttgtagttctccttgaataggtccttcacgtcccttgtaagttggattcctaggtattttattctctttgaagcaattgtgaatgggagttcaatcatgatttggctctctgtttgtctgttattggtgtataagaatgcttgtgatttttgtacactgattttgtatcctgagactttgctgaagttgcttatcagcttaaggagattttgggctgagacaatggggttttctagatatacaatcatgttgtgtgcaaacagggacaatttgacttcctcttttcctaattgaataccctttatttccttctcctgcctaattgccctggccagaacttccaacactatgttgaataggagtggtgagagagggcattcctgtcttgtgccagttttcaaagggaatgcttccagtttttgcgcattcagtatgatataggctgtgggtttgtcatagatagctcttatgattttgagatatgtcccatcaatacctaatttattgagagtttttagcatgaagcgttgttgaattttgtcaaaggccttttctgcatctattgagataatcatgtggtttttgtctttggttctgtttatatgctggattacatttattgatttgcgtatattgaaccagccttgcatcccagaggtgaagcccacttgatcatggtggataagctttttgatgtgctgctggattcggtttgccagtattttattgaggatttttttgcatcaatgttcatcaaggatattggtctaaaactctcttttttggttgtgtctctgcccagctttggtatcaggatgatgctggcctcataaaatgagttagggaggattccctctttttctattgattggagtagtttcagaaggaatggtaccagttcctccttgtacctctgataaaattcggctgtgaatccatgtggtcctggactctttttggttggtaagctgttgattattgccacaatttcagatcctgttattggtctattcagagattcaacttcttcctggtttagccttgggagagtgtatgagtcgaggaatttatccatttcttctatattttctagtttatttgcatagagatgtgtgtagtattctctgatggtagtttgtatttctgtgggatcggtggtgatatcccctttatcattttttattgagtccgtttgattcttctctctttttttctttattagtcttgtagcggtttatcaattttgttgatcctttcaaaaaaccagcttctggattcattaattttttgaagggtttttttatgtctctatttccttcagttctgctctgattttagttatgtcttgccttctgctatcttttgaatgtgtttgctcttgcttttctagttcttttaattgtgatgttagggtgtcaattttagatctttcctgctttctcttgtgggcatgtagtgctataaatttccctctacacactgctttgaatgcatcccagagattctggtatgttgtgtctttgttcttattggtttcaaagaacatctttatttctgccttcatttcgttatgtacccagtagtcattcaggagcaggttgttcagtttccatgtagttgagcggttttgagtgagtttcttaatcctgagttctagtttgattgcactgtggtctgagagacagttctgttcttttacatttgctgtggagtggtttacttccaactatgtggtcaattttggaataggtgtggtgtggtgctgaaaaaaatgtatattcttttgatttggggtggagagttctgtagatgtctattaggtccgcttgatgccgagctgagttcaatttctgggtatccttgttaactttctgtctcgttgatctgtctaatgttgacagtggggtgttaaagtctcccattattattgtgtgggagtctaagtctcttttaggtcactgaggacttgctttatgaatctgggtgctcctgtattggatgcatatatatttaggacagttagctcttcttgttgaattgatccctttaccattgtgtaatggccttctttgtctcttttgatctttgttggtttaaagtctgttttatcagagactaggattgcaacccctgcctttttttgttttccatttgcttggtagatcttcctccatccttttattttgagcctatgtgtgtctctgcacgtgagatgggtttcctgaatacagcacactgatgggtcttgactctttatccaatttgccagtctgtgtcttttaattggagcatttagtccatttatatttaaagttaatattgttaggtgtgaatttgatcctgtcattatgatgttagctggttatgttgctcgttagttgatgcagtttcttcctattctcgatggtctttacattttggcgtgattttgcagcagctggtaccggttgtgcctttccatgtttagtgcttccttcaggagctcttttagggcaggcctggtggtgacaaaatctctcagcatttgcttgtccgtgaagtattttatttctccttcacttatgaagcttagtttggctggatataaaattttgggttgaaaattattttctttaagaatgttgaatattggcccccactctcttctggcttgtagagtttctgccgagaggtcagcagttagtctgatgggcttcccttggtgggtaacccgacctttctctctggctgcccttaacattttttccttcatttcaactttggtgaatctgacaattatgtgtcttggagttgctcttcttgaggaatatatttgtggcgttctctgtatctcctgaatctgaatgttggcctgccttgctagattggggaagttctcctggataatatcctgcagagtgttttccaacttggttccattctccctgtcactttcaggtacgccaatcagacatagatttggtcttttcacatagtcccatatttcttggaggctttgtccgtttctttttattcttttttctctaaacatcccttctcgcttcatttcattcatttcatcttccatcactgataacctttcttccagttgattgcatgggctcctgaggcttgtgcattcttcacgtagttcttgagccttggctttcagctccatcagctcctttaagtacttctctgtattggttattctagttatacatttgtctaaatttttttcaaagtttttaacttctttgcctttggtttgaatttcctcctgtagctcggagtagtttgatcgtctgaaaccttcttctctcaagtcgtcaaagtcattctccgtccagctttgttccattgccggtgaggaactgcgttcctttggaggagaggcgctctgctttttagagtttccagtttttctgctctgtttttcccccatctttgtggttttatctacttttggtctttgatgatggtgatgtacagatgggtttttggtggatggcctttctgtttgttagttttccttctaacagacaggaccctcagctgcaggtctgttggagtttgctagaggtccactccggaccctgtttgcctgggtgtcagcagcagtgtctgcagaaccgcagattttcgtgatccgcgaatgctgctgtctgatcatttctctggaagttttgtctcagaggagtacccggccgtgtgaggtgtcagtctgcccctactggagggtgcctcccagttaggctgcttgggggtcaggggtcagggacccacttgaggaggcagtctgcccgttctcagatctccagctgcgtgctgggagaaccactgctctcctcaaaggtgtcagacagggacatttaagtctgcagaggttactgctgtctttttgtttgtctgtgccctgcccccagaggtggagcctacagaggcaggtaggcctccttgagttgtggtgggctccacccagtttgagcttcccggctgctttgtttacctaagtgagcctgggcaatggcaggcgcccctcccccatccaggctgccaccttgcagtttgatctcagactgctgtcctagcaatcagcgagactccgtgggcgtaggaccctccgagccaggtgcgggatataatctcctggtgcgccgtttcctaaggccttcggaaaagcgcagtatttgggtgggagtggcccgattttctaggtgccatctgtcacccctttccttgaccaggaaagggaactccctgatcccttgtgcttcccaagtgaggcaatgcctcgccctgcttcggctggcgcacggtgcgctgcacccactgtcctgcgcccactatctggcactccctggtgagatgaacccggtacctcagatggaaatgcagaaatcacccgtctaatgcgttgctcacgctgggacctatagactcgagctgttcctattcggccatcttggctcctccccccacaatactttttttttttcttttttttttcgagatggagtctcgctctgttgcccaggctggagtgcagtggtgccatctcggctcactgcaagctccgcctcctgggttcatgccattctcctgcctcagcctcccgagtagctgggactacaggtgcctgccaccatgcctggctaactttttttttgtatttttagtagagacagggtttcactgtgttagccagtattgtctcgatctcctgacctcgtgatccactcaccttggcctcccagagtgctgggattatgggcgtgagccaccgtgcccggcctggaattattaatacttttttgtttgtctagtctgaagtcctgttttcagtgtgtccctactggggtgtttctgaggtattttagcatcccaggctcccagatatcaaatgctagtagcattctagggctgtgtgacatgaaaacctctccccaccagtttcgaaatattcctaggggtgagagtagggccaagcatttctgtctcccactgaaaactactgtgtggttaaaaatgtatatcagttttctttttaaggaaactttatagactcaaattttaaccaacttagatatcccttttccaaattgatgtgtatttcagatttcatggaaataacacaaatagcttaactttcatgaaacagtaagatagccttttgaatgtcttagagtaatagtaactataatgcctctccaacatattacagttaaaatgccatggcacatcctgtgaagtagctaaagttgccacataaaggtgaatttaagtgtccaagttaatttggtctttaagccatgggaccaggatcccacccagacctcatgtgatggaaagggagcttcacagattggacaaaactggcctttactgggaggagggaggaaagatgaaggaaaagctgggtttggggagagagaggagcatgagatactgacagtgttgctcctcagggctctgcggtgggtctgttgttgcagcagtgggagcaattcatctggaggagagtgaatcgctgctttgattcttacccacttgcaaaaactgtaaaatagaaatataatttcagcaaatacattttaaacagtttattgaattttatccagacctgataaaatgcttgacccatagaatttgaatgaaggccagaagacacttgaggcaaagggaagagaaggtacaaagatgagaagtgaaactgtgtgacttgtttggaaactccagtatttcagtgtgaccaaagcataggatttgataggggaggctgcaggagatggaattggatggaggctcagggctgcctcagtgcacagctccatgcacatagatgacagtgattgggactccctgtctttggcagtgtggagtctattctgctgcgtcatagaggtctgtttgggtttcaccaagagatttgcattttatcccttcagccagtgatcttcagggtggtccagtatacagccaaattagtcaaggggagtcacagatactttagactttgcagataatttacttttgctaaaaaattagaacatgccctagagtaggaaaatacaataaagtaaaaatatcggttttccttaatcagtgtattcaatgaagtcccaattaaaatgcaaacagaattttttaaaattgaagtttgcctaaaaatatgaaaatactcaggaacattctggaaaagaagtgtgatagaggagtattagtcctgattctcatttgcagtcaaacaatccatgacattccaacacatatgctttaaaaaacttagttattttacttggaggactattgatatgggagaaatagcatatagataaatggaacagaatagagtccaggaacaggtcaagaggatagtgggaaatgtatcgacaactcccctgggaaagtgttatgtttctgttgttaaaaaaaaaaagaaacacaaataaaaacagttttatatcttttcttccttttttgtctttcagaataaaaacgttttgataccaatgttgtctaggatataagcaaaagggtactttcatacaatttttatggatatataaattgatgggaacattgtgaatggcaattctccacttgcatcaaaacttctaaatgcatgtaatttactataaggatatattttcaaagtttgccaagatgaacatacatgcataatacatacacacaatgatattgcagtattatttgcaataggaaaaaaagcaggacatacatcaatgaggaactagttgaattatgtcacttctatgaaacggaaggaggtgggtctgtatgtgcagatatagaaagatctataagatatatcattaaatgagaaaagcaagttgctgaatggtgtatatagtatcattcttttagtgcaaattcaagaacagaatttcatacacatttatttggaagagatcagaaaaacaatgattatctttggggagagggatggttagaactgagtgtagagaggaagaaacttcttattttagacctttctttaatgtttgggtttactttttacttgaaatttttgatttttgtttgtgtaatattttacacatcaacaggtgtatctggatgatgagatttgttaaagaaaaattattcaatcgttctaggtatagggaccactacaatgggattttgcagtgtctgagagagattgggttcaacagcatgggcaagtgggaattaatagccaaggagcagattagaaagtcagtaaattactaagaaaattactaagaaacatcaggagtaagggagattctggctacaccctctttaaacttattttaaagatcatgttgttgttactctgcgttttgtgatattttggcttaaaacagtgaaaatctgacctgaaattaatactgagcctagataacaaaataaattgaagaagagcatttaggttaattgcaaaacaaaaagtttagctagataaatacattaaattaaaaaaaaccctctctcatctaaataagatttttaacatttagcaaatatttaatatcttttcctttatatttgttagttcagaataggctatttaagcagttctttgaaactagaagcccccaactgtttagaaaaaataaaccttggactagttcaagaagataattttaattagagataacaatctcttgaattctgccttcttaataattcttgtatctgtttgctactccatcatcactgccagctgccttaagcagaccccttatttcctatttcctagaattctgtattagccccatggctggtttctcttcctgcctccttgctcccagtagcacgcccacaatgatctttctgaaacacaaatgtgaacatgtcactctagtttaaaacccctagtttaaaacccttcaggactcctcattgctttcaggataaatccaagctcctctgtgaggctttcataacacagtctttgccactagactctcttttcacctggtttgcccctgactctttgaagctgaatgttccagcaaaaaactatcatcagagtgaacaggcaacctacagaatgggagaaaatttttgcgatctatccatctgacaaagggctaatatccagaatctacaaagaagttaaacaaatttacaagaaagaaacaaccccatcaaaaagtgggcaaagaatatgaacagacactgctcaaaagaagacatttatgcagccaacaaacataagaaaaaatgttcatcatcactggtcattagagaaatgcaaatcaaaatcacaatgagataccatctcatgccagttagaatggtgatcattaaaaagtcaggaaacaacagatgctggagagaatgtggagaaataggaatgtctttacactgttggtgggagtgtaaattagtcaaccattgtggaagacagtgtggtgattcctcagggatctagaactagaaataccatttgacccagcaatcccattactgggtatataccccaaggattataaatcattctactataaggacatatgcacatgtatgtttattgtggcactattcacagtagcaaagacttggaaccaacccaaatatccatcagtgatagactggataaagaaaatgtggcacatatgtaccatggaatactatgcagccataaaaaaggatgagttcatgtcctttgcagggacatggatgaagctggaaaccatcattctcagcaaactaacacaggaacagacaaccaagcaccgcatgttctcactcataagtgggagctgaacaatgagaacacctggacacaggcaggggaacacactggggcctgttggggggtggtggggctaggggagggataacattaggagaaatacctaatgtaggtgacgggttgatgggtgcagcaaaacaccatggcacttgtatacctatgtaacacacctgcatgttctgcacatgtaccccagaacttaaaagtgtttttttttttttttttaaagctgagtgttcctggcacaggtacactgtacactttcactttggagctaggtctgctaggctttagtagcattctgtgtatctttttgtcaaagctattaaaacgtatcattgtccttaccaatccccactggactgtaagcactctgagaatgggcactctttcttttctgtcgccagtgtctggcacgtagtagctgttcagtaatgctgagtatgacaaattgtattagtcaatagattaccaaagtgtatctttgcacctaagaaaatgagtaggcaatgtgaggtgagtatactttgaataatcttgaaatgcactacagtcaaatgcacgtatgatttcttttatttggataattctgttggatgtttatttactatgtgaaaatattgttataaaatgtatgacacttttattccttattagattatgttatatgtttcatagaatgatactgcttttcactcttgatgatcttggtttctctgtcttatttagcttattcagctgattctgaatcatcttacactaccagacctgtgtagattagcacagacttgcaaactactgagccagcattgctgtgatcctctgcaatacatccacctcaatctgcaaccatactgggcaaaactagatgacacttctctggaatttctacagtctcgctgcactcttgtccagtggcttaatttatcttggactggcaatagaggcttcatctctgttgcaggatttagcaggttagtacaaagccttgatgaagtttttttcccccccagcagcaggttatacttattatgtagtggttttcataataaaagtttgaaattatgtaacatgtacttacaaaaataaaaaggaaatatattttgagtgtcatgtttagaatgctgctgcttataaaaaaataagtgttttactatcctcttcagctaaattttatatgaatatgaagggaaactataccctttacttcatgtttcttaaatcccaagtaactttcagcagagctcctgtttcttctttttcatatttgcagcacagatgattaacacattttaaaaactatttccaaatcaaaatctacctctctaatgtgatttgtcagaaatggaaaacaatttattatagaacatttttaattaaatcttaattacatgtgcaatacatcacccagatttagaagctcatttaaactaattatgttgaaaatgcagttgcatgctaaatagacgaccacacttgcagacctgcccaggtgtttccgctcctttctatttaagcatttagtttccttactattaaatgtcacctgttaagcatttgaaagcttgcacaagtgcatattcatttagtaatgccatagtaattttttcttaggatacaaacaggtgtttttctcctaaccttgatcatggtttttctcattgtatgttacatataatcccagcattttcatgaagttaaataatgaagaagtagaaactttagagaaattttctgttatttttaattaatgaatactcttgtattctatttttaaaaatgaaaagtgaactgtagcaatccctacacatatccccagtgtacattctacaacagtggtttatgaattagaaattcgtatgtggagccttgtttcctcaacttagattataaaaataaagatgcagttccagaaataaagatttgatattgttagatttaaatgaagtaatgatgtttgaaatagtaacaatgtgttccaaatactgagcttgatagtttatgcatcaaagtgaaaaataaaccaagtagtaatggctagtagcacatgttgaaaccatggatgcactgagtttcttttctgccagaaattgaaccaggagaaggggttcattgctagatatttggcagctgtccagtgaaacacagtttagtcctttctacttccctttgccccaaacacacatatttcaaattcttttctctgctaataggaccaagaaagaactgaagctaatgaagtctgtgaatatttagagtatacattatcataaaccaagactaactgaatatgaaaacagaacaagtggtgtcagtaagcattattttacattatgtagaccattagggtattttaattaccctcatagctctttcccaatgttttccattattaagaatttattaaacgtttgttttcaccctttgtgtgcaaggcattgtagtgggtgttgatcatatacagagacatgagatatataatatagttcctgccttcaggctacagagaagataaagatattaagataaacatataaacatatcccttatttttataaacagagtaacagggtagtaactaatgtgtagacattaaagaaaatattagtcgtgaatggctgaagtccagctgtactggcaaagtgctgcatatgactgtgataataacgagtaaaatataaagctaatattaatcaattttaaaaactttatgcagcttctggcgcttgagaagaaacatcacttataagaagaaaacttagccatgccatttaaaaaatttttatactagtaatggataaagatcttttgcaaagttagagtttctatctactttctaacccacaatttatcttccattttcaattcacccagggtagttgctgtagagcagtttgaataatcagaaaaagccatatataaatttaagttctcatattttactgtagtatttcagccagtaaaatcataaatcttgatggcattcctttaagtgtagtcactattcccattaagaaaagaaaaagttgaggtaagagggagagagaaccttttcttgtggggggcatattggagttttgcctactgattactgttggcccccatgacttgactgctgaattgatagttattatggcttgtaggcagcattcccagaataaacaataaatatgcatggcttgattattaatgaataatctttgaataagtatggtctatttatgctcagtactatgaagaagacttatttgtaatactttaaagaagaaaagcacatttaaaaactagagaccaatgttgatgagctgctttttgaacaaatctttgggaaaaagttggatgcagtttatttttgttgcttaaaagccttatctcacaagttagaactgtttaactagattttaaataactttttaagaattgttattattcagaatagtggagaaataggttgcattggaataaagagaacttaaaacttttaatcagttattaaaatcctattctagctacagatttgtgatttattactttgagtactgttcatgcatatcattactcattaaaatcacatctattataattccacttttctagtatggttccccaaagtcttagatgttcctttccctgcctgcctgtttgtgctttggaacttaattgtatcattctgttcaaaaagccttaggttcattttttccctaccatttttcttcaaatatttgctgaatggccttgatctccccctcagttatgtgtaggtttttactctaaactcctcttacttgttctcggtagtttatattcattcctttaggaaacattcttggatgcgttctagattcgagaactttattaggtattttgacatagagctaaagttttatggtataaagagcttatttcccactaatatatttattcagttgcctgcctatattttatacagttgtgtcttagattgtcaactctagaaagtagagaccattttaaggtgttcttttcccttctttctatcattgttggatagtacccatatacagttaagcaggaagttttgtttttaatggctttattttggatcagctatattaaataatgttccaagttatttgggattaaaattatcttgaatatattgttttagaaaactcggtgagggtcagctaaaaaaacatgagattaggaatttagaagtcatagatatttatatctaattcttctcttttatacttcaggcaatttctgaggactattaccttttattttgtgataagtaaactcaagtcattcacgtgatcttaattattttaggatgcaagttaccatttagtaaattgcttcttatgtacttgtattattttggacaaattaatcacctcataatgataagcaatttacttttctctccagagattccttttctcatagcaggagacttagtctgggattgtttatctgacttaggtcctctcataaaaccttcagtataaaaaaatactttgtgagcattcacaatgtagaatgaattgactgcaggaagtaaacaagctgagttctcctttcaaatgatcagtggcacagttgagatgaaaaaatacatatatgtaattatgcattaaagtaaaacctgcatgagaagcattaaggaaagaagtaagagctgtgttcagctaattgagtctgctactgtctctgccctcttgggatgtagatatgaaaaggtaggtagtatacattttgaaaatttaagtagagataatatgaggatattaaataatctgctcagagtaaaaatatgcaatatgggattcttgagagagagaaagaaagtcagaaaggtagtataggtatagactttatcttattttgctttcaaattccatcattcattaaatcaagttgggaagtttcctattgtctcctaacagtttgctttctggtataaagccagagtctttatagtgacacacactacgtcaactgtccctcatctctgatctactcatctcgccatcattttgcgcctcctgcatcccccgtctcactgttcttcactctgcttgttatcctgccctggactgcccttccctttgcctagaatgctcttcctccagatacctgctttgctcaccctctcgcttccttcagggttttactcaccacatctctgaagcttctctgactactctgtccatccttgacactttctattgcccttccctgcttttatttcctcctgggcacttttcacaaatttgcgacttactttactcatttggttatcatctccttctctcttcaaaacattagtaagcttcatgagagcagggattttgttttgtccactgctatctccccagtgcctagactattgcctggatgatagtagaagctcagggcatatttgttgaatgaatgaatgaatgtgcttcatgtagactgcagtttagctaatacagctagcaaaggaagcagcagtgagaggggttggaggagatccaagagagggagttatgtgaggagtgtcagagttttaaggaaggagtgtgcagttgtatgaaatgtcacaaatcaaataatacaagtttgaatttagaataaacgggtgttcacgtgtaaataagatgtgcaggctactgggttatttacaatatttaaatttgcagcaactgaatttttttattgtttaaatgtgaattggccaagatttaacttatacttaatgtttatggggtgctttgacctttaaaaactgcatttgcgtagtatttcagcttcaatcccacgaggcagtgtggtgaatgttgttacatacttcaagtctgcgtttacagctgaggaaatgctaagacttgagtagatgccttttccaaggtctctgctaggaactagtcaaacaatgcaaaaaactccatcttttaaccagtgttactttcttttatttacacaactaatctgatttagtcaattttactttgtatgtgtatttgtaagctcattaaatcatttaggaataaagatgtggcataaattgactaacagtatattactgatgtgacactggtgggaagatttatgtcaagagacctggacaggcataattggtacactgttaagagggttcagtttgcttagttgataaagtttcatggattcaaatactcctagattcatgtttacttttagattgttttcaggggatgatcatagacaggactatttttcccccaactataacataactgacataaatattgtggtaactactctgataaagcattttgtgaccttcatcttggtttatttctatatattttatgtaaagctgcaattgaatattttcaatatcaagcaatctagctgctaaatagtaacagctgcaagtaccataacagtgctgtagttaaacccacatagacattttctgagctgagaggagcctagtctgatttgttttgaggttatttaaataagttgttactttcgtgtgcagtgttcaaaatatattatccagtacttgatgggtactgttgagggggaaatatctcccaagagtttagagttttgttatgttttgctgtttttttttgtttttgttttttggctttaccaactcagatgtgaattataggtaagtgggaaaaatatatcttctactttcttaattttccacttagcattagctgactttttatatgatgtgaattcattttgttctctcaagttgatttttttagcctaaccattcatatttcagtatgcagtgaataagaatttaagcaaaacaaattttacattttccctaatagaaatctattctttcaaatgtatctacttagagttgctaaaattccaaagttcttgcaaaaatatcttttagttttataaaattcacatagaatgttgttttggcaggtttctgaaggtttgtggatccgaattagtacgccttgaattgtcttgcagccactttcttaatgaaacttgcttagaagttatttctgagatgtgtccaaatctacaggccttaaatctctcctcctgtgataagctaccacctcaagctttcaaccacattgccaagttatgcagccttaaacgacttgttctctatcgaacaaaagtagaggtgagagtaattcataattttcatcattgctattatggtagccaactgaagatttggttttctgtaattgctcataataatgtgttttttatttttaaatcaagtttatgatgccttctgactactctgaaatcaatagagctgattcagtcattgtgaagttatttcaaacctaatatgcttttaaattataaggaaatgttcttctctatgctcttaaaatttttgtgatgctatttatgtccccaggaaaaaaaataagcgttggttgaggtaagccaaaatgctggcagggaatgaattagagaaaggtaggaggataatatgtaagaggacatttgcttgcagtgggaggaagcaaagtgatatttatcctggaccagacttgggggttaaaatttgtaataccatagttaatgagtctcatttaaaaaggaatcatgtcatatatattagtctacttgctttttcactaatatctctaggacatgtttccagggtcagtgcatatattatctaactcttttactgtaatagtgtatgttataccataatctatttaacattctccaaatgatcaacatttagtttttccagttgttttccttttacaaactacctagcactaacattcttctgtgcatagttttttttttcttttttgagacggagtctcactctgttgcccaggctggagtgcaatggcatggtctcagctcactgaaacctccgcctgaccagttcaagcgattctcctgcctcagcctcctgagtatctgggattacaggcacgtgccaccatgcccagctaatttttgtatttttagtagagacggggtttcaccatgagcctgtgcatggttttacacatacttactattactgctgttggatagagtcctagaggtggtattgctaggttaaagagtatgtacctgggcccctgtagtacatactgtttgtcatatactttttccctctgctgcatgcatattggccttctttctattccttgaatgttctgacctggtcccagctcagggcttttgtttttttgcctgtctggaatgtttgtctagctcattatggctgcccttttttcagctcagtgttcaacttgcatatttttttagagatggcttcctggatactgtagcaccccttctagtttgtttccttcatatcatcaagtttcatttcctttttaacatccttgtcactctctgaaatgatacttgttttcttgcttattttctgtcttctcacattaggatataatggtagaagccttgttggtctttttcattgccatatttccagaatctagaatagtacttggtaaagattggccattcagtaaatatttgttaagtaaatgaataaagataaccaaattacttttccaaaatgatataccagtgacttgggagactggattagttctggtgggaatggtttggttcccaagagagcaggtggttgtaaagcaaggatgccttttgtgtttggcctctttgtactgtctgcctcccctttgatcttctgccatgttaagacacagcaggaaagcccttaccagaagccgagcagatgacagtgccatgccccttgaaattcccagcctccatacctgtgagctaaataaactctttttctttatcagctacccaccctcaggtattttgttatagcaacaccgaatgaattaagatggcattattctcaattttgggcaaaatatttagctaggcttcaacaggtgacctggcagggtggaaagaagactttgattctagttctagccctgccagcaataagcttggtaatctaggtgaagacattgtctcagatttccagattttttatttgtaaaatgaaataattattgtccctgaatgccagatgatattagcctgtgttttcattggtctgtggtgaaatgactccccatttgtgtgggtataaaattgctagctatcttttcttgggtaggactgttcattctgaaattatgccatacctgctttttactggcacatttactattttatgggcctaagtactataaacgaaatcctctgagcaaggaggatttaaatgcctcatttaaaattttctgattgtttaataagaaatatagcaggcataattattaaatgtagttattaaatgagcctttgagaagaaaaatagggtaaaaaccaaaaaaatattaacttgctaggcatcttatatctattgtggcttgtgaaaatatatcccatgagatgtttttgaaatgttgtatagtaatgtgatctaagtgtcagagaattattagtctacagttttcttaaatttgtttcagactgatagatatgaccaaattttttaagtgtgatttatgaggattaagaagatttcatatctgaagagtggaaatttatacatatgtacctaggtctagatagcataagctctggtttccctcagttacttaaatacagatgtaaaatcattgtatgaatatattaaataaaatttaggttgtaccctctgttacttcctattaaattttttttattggctcatctggtaaaatatcataaacactacgtaatttttctgacattgaatatgtagaaaaaaattataaaactgagttttcagtgatctatggttgacttaaaattaaagatgctgttattttagtgatataaatggcaaatgtgaaatttagaaaatcttacccaggcagtgtttacttttaatgcctccgaactcattgctttctacctatacttcactctcttattgtctcctcattcttgggatctgtatcagagtcccacatgggcactaagtaaattagaaaaaggagagttggcaaaataatcagctgatttctttaaaaacaaacagaagctacagcactagtattcatggcaatctgtaaacacctccattgtcacttaagcaaagcgttatgtcacctccttcttcctttgatacacacactccttttaccttgcacctaatgatggtgtatgagagcaaacagagaatgagaagacaaggtgtaggagactggtctctctttaaatgttccacaaaatcactggcagtatattctcattctagactctgttttgaagaaggagcagtaattgatttcaaatgcctctgcttgctctaaggacatacgtgaaaagaaaaagaagataataattttagttttcttggagaggttattttgttttaaaagggctacaaattatctggtaccactttaaccctgttttcctgaaccctacaaaattctaaaataagcaaaaattagtattaaaaatatggattgtattatagcatattaacttcacagagaccagtttatgatacaatactgttacattttatgtgcctttacataatttgcattaataaatatagtatatttatgccattttacaagacttagacaagtccgtatgcataatgcataaagcttttgaggattttgaagacctggatttttagtcccaaagtttgggaaaaagctactgaatatattctgttggctgtcctagatattttgcattattatttctttacaccagtctgaatagggttggtggtattctcatctttacacataattaaattatggtctcaaaagattaataaattgcctgctggcacaagcaatagagtcaggatttgaactcaggtcttgtggccttggtgttgtagttaaaattataacatatataaaagcatagaatagtagttattctgatagcttggctatttacctaaaacaaggattttctttactacttactatttctaatttgtagttggtaaggagatacaacatagtaactaacatatacaacattataatccatgataaaatacagactattatgtttatgttttataaatatcttctgcaggaaaacggattttttgtctttttactatgaacaagcttagtttgaagtcttagttgttctgaatttataaatcacaatttgttattcaaattacatttagaaacatttaagtgaaagtttgtagaatcaatacataattaactgctttaagtaagtagtttatataggcctactctcaattttatactgtaatggagagcagcattgagacagataatcctcaaaataattttgacatgtaaaatgatgtgttgttgatagctaggtgatgtattcttaagtcgttagccatagccaggcatgcagcaggcctgatgactcagtaagaatgagacctcaggagaatagaactgtggcagggtcagaattgtcttgtatgctgatgtgggtccctccctgcatcagtggttgttcagaatttttagccttataagatagtaaaatatagttcaacttggtttcttaatttatttcatgagatctttttctttctttagatgtgtttaggattacaatgaaaaatgacttcatcagagaaataacaaatgtcttataaatttagcaaagaaaattcactaactaagctatgtgcagagtcagtggcatatatttgttgaatttcattagactcagagcattaaatacatgcttagtaaagaacaacatactattacatcaataaaagacagaatggacgggtatacagtaagcccaaatatatgctcgcattgtcacaggcttgtccttagttggagggtgatctgtgttgggaaacctttttagaagaaattactcttgagctgagatttatgccctgtttagtgtgtaatcccagaattactagtgaaatgggttggtaaatagggtaattttttttcctcctgaatttggtggatcttttagagttgaatagacagcactttctgcaacagatggggatttagacagggaggacactttagttgtgcttagtttcttctaccatccgtggcatggaaataattaggtattataatgatttaaaggacttaagttcagtctttttggttcttttcttttcataagattcttattaggtacgataaagcattgattgcaagtacttctttaaccatacatgatgatgtattttcgtgaaagtagagctgtaaaaatctagcccattcagctgggctcaggggctcatgcctgtaatcccagcactttgggaggctgaggcagaaggatcacttgagatcaggagttcaagaccagcctaagcaacatagcaagaccccatctctacagaaaatttaaaaaattagctggacatgcccctgtagtcccactcaggagactgaggtgggaggatcacttgagcccaggaggtcgaggctacagtgagctgtgattgtgccactgcactccagcctgagtgacagagcaagaccctgtctcaaaaataaaataaatctgactcattaaattgatttttaaatacttgaaaaaaacttttattttgaaataatttccgacttacagagaaattgaaaaaaaaaatgatttcttatgtattttcacccaggttcccctactatatgcataattgttttagtgaaccatttgaatataagttgaaaacataataaccctttacccctggggcattataagtgaaagacataatttgcccctaaaagggcatatatctgtaatgtactttcaaatacttgtgttatgggctgaattgtatctccctgaaattcgtacattgaagtcctaccccccagtacctaagaatgtgactgtatttgagacagggtttttaaagaggtaattaaggttaaatgaggtcattagggtagagcctaatccaatatgactggtgtccttaaggaagaggagattaggggacacacacacaaggaagaccatgtgaagacaatggaagaagatgacccgctacaagccagtaagagaagtcttagaggaaaccaactctgttgacacctagatctcagatttctagcctccagaattgtaagcaagtaaatttctgatggttaaactacctagtctatgatactttgttatagcagccctagaaaactaatacaccttgtataggatagcataagaaaagttttttaacatagtgcatgagagtgtctttaagataagtcccacacgtactaaaacaatctggactagttttagaagtttgaacctgtttaccttttctctgtttggggaaaaaaaaaatctggagtcaggggtgaaagtggggcatgataggtagctcagtaagaatgttattctgttgcttagcagcagactggaaaaccaggagtgttttttaaaagttggagttataaatggaacacctgcatccagttttgattgcctcacttcaagaatgatagagcataaattgaaagaatctgaagaagtgaaaaaactgattataggtattgtgggggactagtatatgacagtaatccataagtatggttcagcatctgtttacttggcctactcagctgtgtcgacagtttcaaggacccctctgcttttatcttcatgaactagaagacaacaaaagaagttgatctttacttctgtaggatattaacactctcctatttttttctttctgtgccagtttatttggcagagcatatatataagtaaaattgcacaccagcctgactgttaatgaaagcagctgggctttctacaaaaggtgtattaactgtcttttgaaagagtgtgatttaatttagtgctacgaatttgttttctgacatgcgtatatggtggtctccttactgcattcttatttgatttaaacaatacattattgtattttggtaagtagagcagggatgagctttcttttaaaagagccattgcagctaacaaagtcagactataagaccaaactgattggcaaatgaagagggtggcttctcacttacagagccagtgctggtaactaagacgagggtgagaaattaaaatagaaagaaccggctttggtcacctaaattaactaatgcaggatgttgttagttgtcatctaaaatgcagtctatttaaaatagaaatgttaatatagctagataatatgtaaaacagaaagatattagtaattactttgttcttaaacacaatcaagaatcaatagttttaatagctgataataagtttaattatcacagataaaactaacaaactttcttagagtccttggtatgtgtctctaggctatatttctgtatcctgattggccttgtagaactttcaatgggaataggtgacttggtggggtgagtatgtgtgccctgaatgaatggactgtagtccagttacagtcaagaagcctaacttgtgagtgcagaggtggggaagataatcttttaatgggggcagactccttatcaaacacaaccatgacagtgaccaataagccaggtgtaagaaatctacctggaaaggacaccattcattagagatggctgattaacccatcctctcacagttggcatgtcctgaggaaagccaaattaaagttataggactgttaatatgtaaactgccatgtctttaaattttttttttttttttttttggtagagatagggtctcactgtgtttctcaggctggtctcaacctcctgggctcaagtgatcctcctgcctcagccttcaagtgcttggattatatgcatgagccaccacatccagccccatgtctttttgactgcaaatctctgcatccattgtaggttgttatgcaaattgatcagtcgagtatctgtgaggaaagatgtattcgactatattattgtaggaaagatccaatacagtgataaaaataggcttcaaaatgagactgcagggcaaggcaaaggtgtgtgaacatttagtcttagattttgtttcatcacacacaaggattttaagaatttgacaaattatctgaaccttaaactgaaacttgtatgttagagctaaaattctgagtctgtggtctagggtagctattaaacatctacagttaggtttagagaacttctttttcctcaaaggcagtgtaaggaactttattaatttttgcaatttatgatatttagccttttctttttagagatctgtcagaattctaactctccaccacaatgttgatcttaaagttgtgaaagacaatattattttcaaggtgattatgtatcagtatataatctataccatattgtgtatttgaactgtataaaagaataacttctaatagatggttcatagcaaatctggacaaagtaattggatttaaatattctaaaatggtgattatttctacatatgtttagtttcaagtactttaaatagttcttaaaatacttcaactttttttttgttgtttttttttgtttttgaaatggagtctcgctgtgatgcccaggctgtagtgcagtggagcgatcttggctccctgcaacctccgcctccctagtccaagcaattctcctgctgcagcctcccgagtagctgggactacaggcgtgtgccaccatgcccggctgatttttatacttttagtagggatagggtttcaccatatttgccaggctggtcttgaactcctgacctcaagtgatctgccggcctcagcctcccaaagtgctgggattacaggcatgagttactgcacctggctttcaacttttattctatattcttcttcaccaagtttattgaaattggaagagtggagccaaaaaaaatttaattagagaaagatttacacttatacatgtattttacactccagtaattgagtggttgtgttcttaggatttctttggagacatttgttatgcaaatttatgaattttcatttagtgaatatacttttataaaatttcaccaccttactctgagatagtgctctgatgtgtttgaaatgtagtataatcaatgaaagtacatttgtttctgatcacgttatataactagtctatattttagctagtctttgtctgtaatatgtacacttgttacctatcccttattaatatgctttctaggaatcatgttttagaatggagaatactaatttggaatcctactgtcctatattgagtgttataattaagggttacattctttattaaagataaccaacaattcttaacactgagcaaaaaaagtcataaactagttgtaacagctaaaaacttacattaatgtaaaatagcaaacatattactgcatacattgattatacaaggtctcagtatattataaaatgtacaggtatgcataaatataattctaagctataaatctggactatctaaaagttatatttgagtataataaatattggttatttttattaagtagttttgcttagcactttagaagcctggagggtgggaagttataaagtttatgggtaacgtttcttaaaaagctgtcaatgaaaatttgaattaatgccttttatctattaataaatttcttcttaacaagtaaaggcattaataataattctttataactgaatggcacttcatatctgcatacaccaaacttccacatctgttatccatcatttcactaactaaaactgtttttgaaattgaaaccattgtttttttttttttttttttgagacagggtgtcactctgtcacccaggctagagcagtggtgtgatctcagctcactgcaacctctgcctgccaggttcaagtgatccttctagctcagcctccaaagtatctgggactataggcatgcaccaccgtgccaagctaatttttgtattttttgtagagatggggttttgccatgttcccaggctggtctcaaactcctgagctcaagtgatctgcccacctcagcctcccaaagtgcagtgaaatcattttcttagcagtagtcattgtagtcattgtagtagtctgagtatttggaagcttcactaaaggacactagggggaataaacttgctaaacaaacaagaaggcagttgtgaaagtagggggaaacagtcttcctcctgttataatcattggagtatggtgtttatggactaattcctttgcagtcctttcctgagttgtataggaaggtccggaaccctgatgctataagcatgctttacagttgtttttgcctaattgcattaataaaaactgttcacgttgaacttgtctcttgcctttctctccagttataacttgttataatattttgctgtttacttctttacctttggcatttcacaatggctgagtgtcatgtgaccaacttgaatatttaattatgtgtttactcttccagtttgatcccaggttaagaagcgtatgcttcttatgtgtggcgaattgttgaatttattacttgaagttattcattgggttttgaagctgctgaacagggttaataggtagattttaggtggaatgtaaaataaatcattgtttatgaacatgtattctactgctagatgacagcatgcacctagagtatgttttggtaattctgtagaagaaattatcatggacccagtcactccttagtgaatgccttgccatagttgtttaagtaaggttgccctttgtttgaaaattacaaactcatttgaaaatgaatctgctgccttgcactattaaagctgctattttaattatattttagttttatagaactactcttgtacttctattgaatgagttttgagacctaaccagcagaatgtgtagacttggggacctgaaagatactttatgtcttaaataagaggttcatagaatttttcacttttcatttctgaataaatactgtgccattttcacagtacacctaataatatagctttgatccatccatttgtgtgttctagatatgtagcagtgctgcatatactcattatagtagaattgttttgttctcctaagtagagattggcaaactttttctgtgaagggctaggtagtaaatactttaggccttgcaggccctatgggctctatcacagctactcaatcctgctgttgtagtgtgaaaacagtcacagacaatacattaatgagtgggaatgtctgtgttccagtaaaactttatttacaaaaacaggcagtaggctggatttggcctgtggacagtagtttgccaactcctgctccaaactattgagttggtggtctctacaaaatcaggtccttctgtatctggaaatgaagagttaatttctccgtagtttattctctttgctttgacatcagtaacaacattttaattctgaatactaatagcatggagaaagaatattttaaagatattttaggaggaaacgggttaactggatttaaagacattgtaaactgattccataggcatgttctctaaacctgggtactcccagagtctctggcttttgctgatgagctttgctggagaaagccatgaaactgtgttaatttgtgcttactcacctcagtgctacctgtcagccctttgatttatttctatttgacctcttgttaattcctcacagtatctcttccaaggtcatcattgttctttccattaccatcacttccatctcgcaatatcttggtctcagcatttgatctcacgtctcttattcagcaaagatcagttatatcattcaacataaatctcttttattctatgttaattccttttcaagctgaggattttaaaaatgatagttctaatattaaatgattttttaattcccagtttaatgtacagactaagttactgtaaaatatttgctgtgaattcctcttctatgacttgaaattctcccagagaaaataatgcatctaccatttcacaaatgttttctagacatatataattagacttcagttcaaaagtgagttaggaggatatgctgttaggtctgtgccttaaagttacaatctttaagatacacaataagcagaagttgtgatttctctgaagaacagtccagacaggttaatatagtattcttgacaataaatattttttcttaccattatcttactttttttgtttgtttcttttgcagacaggttcttgctcattcgcttaggctggagtacagtggcatggtcacagcttattgcagccttgacctcctggtctcaagcagtcttcccacctcagcctcccaagtagctgggaccacaggcatgtgccactattcctggctaattttttttatttttatttatttacattttttgtagagatgagttcacaccatgttgcccaggctggttttgaaatcctgggctcaagctgtcctccctccttggcctcccagagtgttagaattataggcgtgagccaccacacctggccttactcttacttttaattcaaagaactgattgtatagggaatttatctcaaactgtatcatgagaatcttattgtcccagtctggggataatcagctaggtgacagtgttccaagccaccccacccaggagtttggatggaagtcttagagaaagaagagattttgttttgggcagatataccaaaaagtatatagtgacctggtattggccatgcctcctggtcagaactgagctaagccttctactggtcctgcagtatccgcagtgccactgcagagcaggacctctataccttcagcagaagtcctggttctagaagggagcaatgtgcaagacccttagacaaggaggaataaaaaaagatggggtcaggagatggcagttcaaagaaatagtgaaagtaccttgtgaaaaagaactagaaattttgaaacataaatagactaaaacaagaacacatagttgtgaaaaaaactgattggaaatctagcaaataaagtatagtcattaggaaataatgaatagatgtgataaattctaaattggacacaggattactaaattagaagagaagtctgaggaatgtactcagatttctaaaaggtatgtcagacactgctgtaagttttatacacacccacacaatctcaatcaataaatctctctctctctctctctcatttactcctaaggcaaggcagtcctactcatttaataaatatatattgtgcctactatatactagtgactctgttatttatctattgctatatatcaattgcttcaaaattagtggcttaaaacaacctacatgtattatctcacacgttttctgtgggtcaggaacctgggagtggtttagctgggtagttttggctcagggtctctaaggaggttgcagccaggttgttatctggtgcttgactatggctggtggctcagcctccaaactcagggggatgttgctacagttccccttcagcttgtgaccagaggcccctgttccctccacacaggcctctccataggctgcctgagtgtcctcatgacatggcagctggcttccccacaagggatcaagttgggagggaggaagccaagacaggagccacagcctttttataactgtattaggagggttccaaatcagaaccaataggagataaagatatttattataaggaattggctgacatgatatgaggctggcaagtctcaaaatctgcaggacgaattggcaagctggaaacccaggagagctgatagtgtagttgtagtctgacaggtagcaggtttaagacccaggaagagctgatgtttcagtttataaccaaattcaggaagaaaccagcgtcccagtttgaaggccatcagacattgttttttttcctgaatttggaagaattctctcttatttgagggagggtcagcctgttttttctattcaggccttcagctgatcagatgaggcccacccacattaggtagggcaatgtgctttattcagtctactgatttaaatgttaatctcatccaaaaacaacctcacagaaacacccagaattggcagggcgtagtgactcacacctgtaatttcagcactttaggaggccgaggtgggtggattatgaggtcaggaggtcgagaccatcctggccaacatggtgaaaccccacctctgcataatataaaaattagctgggtgtggtggcacatgcctgtaatcccagccacttgggaggctgaggcaggagaatcgcttaaaccagggagtcagaggttgcagtgagctgagattgtgccactacactcaagcatggggacagagtgagactccatctcaaaaacaaacaaacacccagaattatgtttaactaaatatctgggtaccccatggcctagtaaggctgatacataaaattaaccatcataaatgtaatattgaaagtgacctatatcacctctacaatatactgtttgttaaaagtgagtcgctaagttaagcccactctctcaaagggagaggaattaagctctacctctggaaggaaagcatatagaataacacgtggacatatttttcaaaccactctaaccgctggtactaggagactccagtgttatactccagtgttcattgaatagaagttactgaagaaaaaaatggaaggaatggtagaaaagtaatatttgaagagagaattgttaagaatcattatctttcatgaagagagatatgagtcttcagatcaaaatgggcacttggggttttaaacaaaataaatgaaaatacatttttagacagattgtgatgtaattgcaggagatcaaaaataaagggacaagagctatcagagacaaaagatatattacctgcagaggaaaacaattagattgacagtagacttcttatcaagtaagagactcataagcaatggagtaatgttttcagagtgttgaaagaaggtaactgtcatctgaaaattcgaagtctagctaaactttcgttctagattgaggaaaaatctcaaatatgcacaataaaatttattttaaaaaaagattgagggtaaacattaagttatttaagtttctgtctttctgattccccatttataatgataggataggtaaataacggtatttaccttataggttaactgttctgttcactgttatatcccaagtgcctaaacggtgcctaacacatagtaggcatgcaataactgtttattaaatgaatgaatgagtgaataggattgttgtgaggatttatatatataaagaatttacagcaatgctacctgacatgttaataagtactcaataaatgtttgttgttaagattttatcacctgtagacactcagtaaaagaacaattaaaaatatttctcaacaaaaagacaaattctgtaaggaagtatcagatataaaaaaaaattatgacacagaaattgataaaatgctagtaaattaactaatgaccatggaggggagattaatttaagaaaaattaatctttttgtattatttctaaaaggtaaaaactaaaacctttaaggtgattctaaagttcacatgaaagagcaaagggccaacagcagctaagagatgtttgaagaatgaggaaaagctatttgccatactagatttaaagacttatgaagtataataattaagacagaaatgttggtgcagggaatggaaaatagaccagtgaaacaaaatgacccagaagtagactcatgcgtatatggaaaccttatatatgacagaaagcattacaaatcagtggatacaatgaagtcttcaataaatcaaactggaacaatgtggggaaaatgaaatttgatatcctaccatataagaatcaattgtagttgggttaaaaacctaagtgcaaaaaagaaagactctaaaactctgattttaaaaaaaaagaatcttagattcttccttagctaaagaagaactttttggaaaaaacaacaggatacaaacataagggggaaaaggattaatggcacatttaatatagtcatattaaaatttaaaatgttcacatctcagaaaatccagtaaacagtgaaaagacatgcctcagagaaggtatttatagctgatataactgacaaagattggtatccagcatgaataaagaattccagaagtcaagaaggaagaaacaacccaatggaaagaaaaatcagcaaaggatgtgattaagcaatttacagagcaggaaatatgaatggccaatgaacatatgaaaagatcttcagtctcactagtaatcatactaatgcaaattataccattctgtactcatgagacaggcagatattaaaaaggatgaaaagtctacgtatgttggtaaagatgtggggacctaacagtcttacagtactgatgggagaataggttaatttaagcactcagaagagctattttgcaaagccaaataaagtcaaagaatacataaacacctggaaattctccttctggtgtgttctctagagaaatactcttctataaatgcacaaggaagcacataaaggaatgtttattctaacactgtttgtaatggtgaaaattgtaagcaactaaatatcaatcaaatgagattgtatgctattatatatttgcataatggaatattatacaatttctaatgttaatattatatgctacttatggatacataacgtatagtaaaattgtatattttcaagcatgttttaaacaccaagtcataataaaggttacctctgaggaagtacgtgaatggatggagggatacaaaaatgtagtgaggtaaacaaaatattgagttgataaattgagtggtggctacatggttattatgggcattcttttggaccctacacttgtttgtatatttgagattcttcatagtaagtaatttaaaaataaattaccaaacaagtttcattaaagattagtggactagagctatatgtatcaacatggacagatccctcacactgatgaagaagatgcagaagtatattcacatcgtaataccatttatatagaaaccatgtagaacaatattatgtgctacttatggatacataatgtattggaaaattatatattttcaagcatgttttaaacaccgagtcatgataaagtttacctctgaggaagtatgtgaatggatggagccatacaacaatgtagccagataagcaaagaatgtcaaaatgttaagagttgacaaaactgagtggtggctacatgggtgttatattggaacctatacttgtttgtgtatttgagattcttcatagtaagtaatttaaaaataaattaccaaacaagttgtgtgaattatatgtatgtgtgtatttatctctatgtatgtgtattttttaatttaaaatttcttaccaacaagaatttatgagattctttctaaaaattctaatattctctggatcttacttaagggaaaatcttataaaacaaccttttaatatggatatggtcctgtaattaaaaaaaaaacaaacctaatgttatgttcctgtctgttaattagttaacatggctaagtattgtgaagaacctgaaaattaaattatcttaatataccctttctaatgttaacattctgagagctacatgggattgttttataaatgttgttatgttgaaacttaagtataaaatcaatataaactttttttgtttaaattcaaagaaatgctcaataatgaaataattagacttaagtataatagtcctctgtggcctattgtaactattattatttttgctttaagtaaccttacatttgagaaatattttattactttattttctcaatgagaatctttatctgggatttgaccaaatgttttacattttcattgacacattcttcacctttccctcaactgatagtttttagtttctgatcacttggaacagatttttacagaagttgtataatatcttaatttttaaatatatttaaaaatgtataagatattttgccatgtaagtttgaatagttttctccttaattgataaaagaaaaattagaaatttgaatattttgcattattttgtttttcacaatttttcatagcagacttttttaaaaaaatattttagggtgccatgattatgtagcagtctttgggtttctttagtggtgagaccattttcattgcacaggatagatgggcttaaatggcaggaacatgactagaaagtacatattatatatatttcagtcagcatgttgctactgacaggtgctcaatggttgttggtatccttgtcagcaaagagaatcctttgacattaaagtcaccagctcaatcctgatttggggtgactctattggcagttccatcaagctgcagctgatcagtgaatgtcagagctgcagccattcttcaggagtgtcaccagcctgctgcgggttttttgtctttttgtttttgtttttggagggaggagtggtttagcttgtcttgttgttcaattgtagccagactttcaaattgcttacctttgggaaatgaaccgagaggtcatagggaatataggtatctttagggcatccaaaaccatacacaaagtgattacttacatggagactagtaatgattaccttgactccaagccaatcaatggtggagcctctggggactcattaaatggcatttgtggactctgtaacctagcttttgagctgcatttcaggaaaagcagtgacagcctttaatgtctaattgacctcttctctttgtttcactttcattcactttccatatttgcctctgatgtggtccctaatggcagcaaacagcactgctcagcattttgaacttctgttcagagcttcagcacctcagtttaggcagttgtgtcatggtaagtgtttgagaattctttatactactcaattacttgttctctttttcttcctatgggtgaaatgtatcctgactcaccctaccccacacacacccacagtttttcagatttatggttctcttctttgtcccttgctttcaaacatttttcttaaattggaaagtatgtctttgaaacactgacattatttatccatgagagcaaggaaagaagtatagtgtggtggaatagagtatagttctgcctcaagccagatgttgtctccgacaagctaatcacctctctaggtttcttcacaaactaaggtgttagtcatacctaaatgccgatagttcagtaagtttttcactaagctcattttagcttttaaatcctgagatacttttcttgaaattttaatgataatagataggtttattttatctgtttgtttttgtgtttgttttactgtccttactggtcaaaacagaaagattaacaccctatgttggaactcttttttgtgtgtggaaattttactggtctgtgaaatataaaagcctagggactgttggactagataagcttcaaagtccttccagatttttttttttttttttttttttttgagatggagtcttgctctgttgcccgggctggagtgcagcggcgcgatcttgactcactgcaatctccgtctcccggattcaagcaattctcctgcctcaacctcccaagtagctgggattacagggatgtaccactatgcccggctaatttttttgtatttttagtagagatggggtttcaccctattggtcaggctggtcttgggtttcaccatattgggcaggctggtcttgggtttcaccatattgggtaggctggtcttgaactcctgaccttgtgatccgcccgcctcggcctcccaaattgccgggattacaggtgtgagccactgcgcccagcctagtccttccagatttaaaatacgattttatgtgcccttgaaagagctcatggaaagagttaaatgttttaatctaaaccacataattatatagcttttaaataatactgagatataaaggacaatagaaatcttgtgtggagaaggtgtgcatgtgtgtgtttgtgtgcacacataccgtaagtgaatcttccagtgtaactgactggaagaattcattcctcctcacttcatcccctgttccctaaaacaatgtaggtttaggagatccccagaccattccatttctgccttgcattcacttagtaggaagacttgaattagcaaaatgattgcaagattctagaaaacttctggtatgctagggagtatttgctttaagtaaccttacattttgagaaatattttattagagtcaatagacagggtccctgacctaaaatgagtaccatttgaacacctcttagagctcagtgtggcttcagaaatgcctcaagatttggcagtgtagactaagtaggcctcttttgatgacatatttatctctgtgtccccatggtctttaaaatcttgtggttaggtcttattaaaccctaagtatgggctcaggccatctcagtctctagaaacagtcttgggagcccactagattttcctcacttctggtcaaattctttccatagtaagccatttgataggcttctgtgggtctcttcagtgactcttcttgatggacccgatgacatttgatggcagtttctgtcacaacaaaccagccagttactgccacttggatcttccttattgctagcctgctctctttagattggtaaggaccatttaactttgcttagatgtaccttattctgcttgttatttacctccccttaaactggagcaacattccttagaaaatcaagcctctggccatagactctttactgttggaattatatatatgcttataattgaaattgtattattttaagttagcattttccagagttgacccatggaaaattacctctaaaggataatcaattttaaaggctgtgtatttgggggtggagtggagattcctaatgaaattaggaagccaggtatggttgctcaaacctatagtcccaactactctggaggctgatgtaggaggattgcttgagcccaggagtttgaggctgcagtgagctatggttataccaccgcactccagcctggtcttagagttttacaatggtgtgtgctacaacaaagaaactgtttacctttgctaaaaccagtgttttcaaaccttgcctgactactgaactcatttttctatattacattttccatattacattttattgttgactgtcaatataatagcaatgtttagatttgtgatatttatgaagcaactgttcacagtatacatacatagagcactgtgctgactttcccatggtgattgtgatctattatataccttcgctgagtattcacctcatggcatactttctctgtagtgagtttaatgtagatactaaattagttgtgtcactttttttctgaaactaatctttgtgccacaagtgccagttagacagatttgcagtgacaagaacttctgaggagcagtgtctcacctgtaataaacctgaatattctagtcaatgccgtaaacatgtttttaggactacttagaaatatttatttttcctcttgattgggaaagagacaaattttatctatttctttttacttctaaaaatgactttaaaaagtttaaattccactattatataatgctgattgaagtaatttaaagttgcctaaattaaagaatcctaagacctacctgctattttcttaagtttcctactaattatgtgatcctggttaggtcacttaaattcttgctgatagttcctctgtgacatttgccctatttttaaaattagataatgaataagaaaataaatatgtctaatatttttggggaaaaaagagtcctgcataatatctaaaatttagaaggaattatagttaataaaggagggataggttgactttgttccagtaaaaagtatttagtttcatttttattttcccagccctgaatttggcatgagtagtgctgtgataatttcacaacaacaacaaaaaactcttgaaggaatttctcactgtgttctatgctagtagagaatttgttcaaatgctgctgagattgcccaggcacaaattgggcacagtcagaatcataggtttcataaagtttttaaattttttttttctaagtaagctaattggctgccctaattatcaaacccacagttttgtattgttcaggtatactcacgtaaggagatatgttcccccaaacctgtttctcatagacttccgcatgattccaccatacatacactgacatccagaaccttagaaatcattacctctatatctaatctgtcagcctttggttctaactcaaaaatgcagccccaaatctgtcggatttcttcattccatcattgccaccttaatccaagtccctgtcatctgtcctttacactgttgcagacctcttcaatgagcttccttctccgttcctccccactataggcccatcctccagacagaagccagaggtggttttgtgtcagtttttatgtaaataataatatgtcactcctttgcttagaaccctccattgacttccttagtacttgaaagaaaaatctaactccttcatggtctaaatgtcctggccactgcgtgactctgccctccatagcccgtcctctccctcaccacccttggactgtatggatctcatttttgttcctcgaatgcatcaacctcattcctggagatttcagcaattaccacctcttccctcaacccgtgacactctgatcactctcacatcactctgttttattattttcccactatatgtcactctttgaatgtattttttccttaattagtctgtgtgtctttcctaaaaatatggacagtgtctccttttttcagtttactgctggtcctagcatctggagtggtgcgtagatgtttgttgaaaatacaattaaacaaaagaacaaaaagaaataatcattgtaattgtttactattttgtttccttttgataattttccttgtgataattttaatatctgattttagcaaaatcaaatgaacctcttaaaataacctatttaaagaaacattattaaagcatgtaaagcccaataactgaaatgtttaatccttgattagtagagtcttgtcctgtaatcatgaggtaagcactggacacctccaataactgacagttgattaacatattgtaatctaaattattttcatgttgtatatgcagtccccaaatgcctcatttaagccaaaactagtatccttattagtattatcagcatttccacatagtgttttagagcctaccagatacacatcagggagatcatatatacttgccaaagtatattagccatatataaaacggaggaaagtaggtgctgtcaatgagtagcagcagcaaggttgaaatggtgggcataaaagaagaacatataatcctttaattcttcatgagagactgaagacatagactgctttgggatttaattcattaacatcttctgtctggagtgctcttaaatggatttttaaataaatgagtactcctggctgttttatgaaacagtggcagatccgtgaggtcagtgggcagatctgtattaacaaggatgtggatttgtttacatggaagcaaagcaataggttataattaagaatctgacttactctaaacagtttgcatgtctgagcataacatgtaaaagattggaattatttgatttccagattgaagactatgatgtgatagctagcatgataggagccaagtgtaaaaaactccggaccctggatctgtggagatgtaagaatattactgagaatggaatagcagaactggcttctgggtgtccactactggaggagcttgaccttggctggtgcccaactctgcagagcagcaccgggtgcttcaccagactggcacaccagctcccaaacttgcaaaaactctttcttacagctaatagatctgtgtgtgacacagacattgatgaattggcatgtaattgtaccaggttacagcagctggacatattaggtaaggttacaatatataaatttgttttaaatgtctgtttccttgacagaaaagccaatctcagactttttgttaggaaaaagaaaatttttggatacaataaaaattttatcctgataagatggcttggtttgataggaaatgcaagatagatcagttaatatagggaataattatatatgtactttaataaaatagtgaggacaataacaattttatagttgaaactgtaaaaaactataaccattaattcttggtctacttgtaagagtgagaatttacatgagctgcgctctctatttttattaaggagagaagaaattaattcatttgtataatgaattcaagctagttttttttaagtttcttaattaaaattcttgattaaggaatatcgtgaaatctttatccctgataattctagcgtttaggaatagttctaccccaggcagatctattgaaaatcttttccagctctgggatttcttgaatccttgctgcattcatcagaaaggaaccctgtgtaattttgttgcttcttacttttagccaggggtgctagcagtgtcacagtagttatcattgtccacacaattgatactttgtgaagtcatatcgcacttgcacattttacatcaaatgcatggtgaaaaccattttgaactggggtgacagaaataggaaagtctggaggagctgatttgaaggggtaggaggtaggaatgaagatagtgggtaggatattggcaagattcaggtcctagatgctaaattggctggaaaattcaacttttacttttttaacagaaccatttcaatatgaagtcatgtttgaaaaaatgattttaatttgtaaagggttattttaagttcattacaaacaataaatcatggatggattcattgttagcacattatataaatgttatacttaaggtgttttgttttgttttgttttgtttcccttaaataggaacaagaatggtaagtccggcatccttaagaaaactcctggaatcttgtaaagatctttctttacttgatgtgtccttctgttcgcagattgataacagagctgtgctagaactgaatgcaagctttccaaaagtgttcataaaaaagagctttactcagtgacttaatatatgttctgtattaaaattaatgtgctttgttggggtttaattttgggattggttttgggttttgtttttagttgttttaatggtaagaattaagacatttgtagattttaaagaaaaatatgaaattgtccattaaatcaagtaaaaatgtgcacaaatgttttcataaaatactgcaagcacttctcttcaagaatatgagtggatattatttttaccttatgttaatcagtgatatgctttagtcaataatatgattgataaaagaataacatggaatcatgctaacttattttcaaaggaacactgagcaataaagtatcgtggcatttatgcaaaaaaaaaagttaattttttacaccttcatgtaaggatgtcttattaagcctgtgacctggcaagtgttttgtttggtatgtacaaaatggtcagagctagttggagaatgagacatgcttttccagctgtttggttatttctctggattaactgttcaactggaaaatttttagtttttctagccaggtgtggtggcacacacttgtagtcctagcgacacaggaggtggaggcaggaggattacttgagatgggattttgagactctagtgtacttatgattgcacctgtgagcagccactgcactccaacctgggcaatatagcaagtccctttctcttaaaaaaaattgtagtgtttccacttttcttctgatatttttgtctatttcactactggataatgccaatataaaaatttgggtataatcaagaataagaggtaaactactaaataaaaaaagctttccaactgttagaagcagatgccttaacattttgtgaaaggtaaagttttgaggtttctgaattatataaaaaaacataaatgtggagatatatattatatatacacattatatatacatattatagataatatatatccacatttatgatttttaatatatacatgtatatattatatattatataattatatattacatttatattatatgtaatgtacatgtatatattatatacatatatataattatatatattatatagagagagatatatatcttgctagggtgtgtggatgctggaatataacgattttgcacttaacaggacaatgaattttgttatactacagttaatattagttttgtgttcaaaacagctgtgccttttcatgccacaaaatattttctgtctactttctgagtagcagaattaattcatttttttaacaaaacgatgtatgtcaagtgttcagtagtcacatgaggagaatgcttcctttgtgcctggcactgtttcttgtgctttgcattgactaattcaattctcacaacaaccctgtaagataaatgccattacttacccccatttacagatgaggaaactgaggcaaagaaagattgaagaatttatttatgatcatacagctgctagtggcagagccaacatataaacccaggccatctggcttctgaagcattgcattaaacctgtgcttttaggtgttcagggtagcttctggctctagggcagaggtcaggaaactttttctataaagggccagatagtaaatattttaggctttgtgggctaagaggtaaaactgagattgttatgtagatacttaaataactagagagaaataaaatttgcacgaaaattttattgacaaaattcaaaacaataatttagaacaattttttttgtaatacgggtttactaatgaaaagaattaaatatttacagggaggatcaaagttaatgtttcgtgtcattaaagttgattgtaagtactcatttgttaatgctgatctgtaataagattttatgtattttacttctgaaaattccttgcagataggtattgtcaaatacttacattaatccatgagaatatgatttttgttgagcatattcatcacttgaaaggttacttcttctctggatattttccttttagcatgttattacattgcagcttaatcacttccaattgaagactaggcagaagctcctcaattgcactgttaaattgattttgaaaaatggaaatttcctttacatttgcaaactccaaaaaatactgcaggcactatggtgtgagctacaaatttgtgtgagagtggagatctcgcttctttgtcttaccttttgatagcacaggaaatgtgtaaagcagcttgttgttacttgtaattcaaacaatgttgtcatcaaaatgacttatgttttgcttgtaaacacgttttgccttgtaattttggcttgaattcatttcaaaattttattaagtcttgagcaaaagctaaattccaaagccattcagtgttccataatagtgattgaggacatgtcttctttttcagaaaaatgtcaatatcagccctgaacgcaaaagctcacaatagaactaacactattatgccaatgtggttgggcaaatcagcatattcatcttctgtatctgacaaaagataactgaaccattgatgtttaatctatcagaaactatgagagcaaatgaagttcaccattgctaccagtagttcagtaatacaaaattgaatcaaatatatcccacaaagtacctgctgatgaataatacagtaaataaccatagattttaaataccttcttaccttttcacaggctttataaatttgacaaacgtaatcattttgcttcacacatttttaacaccaccagttgtaacacatcttagcagattctacttcaggttgcatgaaatttgtgttttcttcttataaaatattcatgcttgtaattgtgccacacagataattcatagagactaatttcagtcacttcaacgttggcattgacttatcaaataagcaataactaggcagtgtcagtaacatctgttgactcatcaagagccaaggaaaaccactcagggtcatttgccttgttttttattgactgttgatgttgttcccagtgttctcaattctttaagcaaccattcttgccaaaaggctaatttaatagtcttaagtttactttggacacagtccttcagccgatagaatcaaacacaatttagttatcgttagtaaaatgttttccttgcttggttaacatctgagtcactttggctgcaactttattttcatttttgagtttgtttttttttttttttgagactgagtctcattcttttgcccaggctggagtgcagtggcacaatctcagttcactgcaacctccaccctgcaggttcaagcgagtctcctgcctcagcctcccaagtagctgagattacaggcacatgccaccacacctaactaatttttatgtttttagtagaaatggggttttaccatgttgtccaggctggtcttgaactcctgacctcaagtgatccacccacttcagcctcccaaaatgcttggattacaggcatgaaccactgcatctgacctccctatagtattctttaagaacagctataatgacattgcatattaaacatcatactctgacatctaatctgatttttaaaaattcatatactaatgtgccttaaaaatgtcacttcaagtctacttttctttttttctcttgttttgatgttatgggtaagcactagtaataaaaaatttaaaaatattgtggtatgacaacatatgtggcactcaaaatgctggtaactgcattactgcagtttttagtgtgccaagtagcagtgcaaaatgatgacagcaccacataagtctcctttgcatttgttcaactctgccattctaatgtgaaagcaatcatagacagtacctaaacgaatgagtgtggccatgttccaataaaatttcatgagcactgaaagttgaattttacataattttgatgtgttacaaaatactactgtgttagccattagattttttcagccattagaaaatgtgaaactgttcttatgagctggctggatttggcttgtggaccaaatttgtgacccctattccagagtattttcgagtcagttaatccatgtttgcccattcctaattttataaaccacattcaaacctgttaattcgctgttatcattctcattttgccatttagattttaaaatgaagagcagtgttttgttagaaaaaacaaaatgtttaccataacaagaaagatgtgtagacaagaaagatatttatgtagactctttgtttgttaaattttgaagccaggtgatgcattgttagctttgacaactgacttaaatttttgtataattatttatctttgcattttgctcaggtaaattatcttcccagagtctagaaataaagatatccctgatcctgtttaagagcataaataatactctcaatgtaaattgttttgaaataagatcttaaaaatacaaaatgtagacaattaatattcaggtgcttacttttgagccaatatgtagcagagaaaaactaatttctctgtggcagtatttttatttttggcatttcccaggaattaactgaagactaaaactcatatgtgaagtgtaatgatactaatcaaagagtcagtaaaatttccatttggctaccatgtatgtgtgtatatatttatgtatgtatgtgtgtgttacatatttgagacagggtctcactctattgccccaggctggagtgcagtggcatgatctcagcttactgcagcctcagtctcccaggctcaagcgatcctcccacctcggcctcccgagtacctgggactacagacaccaccacacctggctaatttttttattttttatagagacacagtctttccatgttgcctatgttggtcttgaactcctgggctcaaataattttcccaccttggcctcctgtagtgctgggattacgggcataagccactgtgtcaggccccatgtatgttaatagtgaatgtttggcttttcatttgttactttcagctattaaaggatacctattacagacacaggaatttacattttcaaagtcatttttgacacatcagtgctgcatctacttttctccttttagcacatttgatattgatacttcagagaaacttttttaactacccttaaaatcttgtcaatgaccattaactgccaatcatcacctcatttgctttttttgacaacatactactagaaacctaggctgtgagtgtaaaaccataactgttagaatcatttttttggcaatagctcacattctgttaagagtcatttgctttaatcaaagatcatgatttattatatattttttataagtagggatggggccaagattattcctttggcacagcagtaagtgtgctcaagatctttgcctgtaagcttgaatatttggcttaaattttgtgcatatgaatactgttaaaggtatatttgactacattttgaaaggaaaaaggtagtcctgctaaaattgacatttagggatattttaatctatgtatttggtaaagtaattagtgaagtattagttataaaaattttaaggaaaacatttaaaagcaaaatagtcgtatcagataaatagagtagaatacactaaagataaaacaagtctctgttacaaatgaagttgtctgtacagacgactgagatattttaattttatttacataaaaatgctgttcaatatctaatgatttctgttgtttgtattctgtactttagagtaataaaataagtttgagtatctcattagttcactttcaaaattgatcatttcagggcactgctgaatataatggaaggtttgggtaaataggtttgcgtcacagcccctgtgaaattaccagcctagatgaggagccatccgcctgtgtacagaactcttttttttttttttttcatttctctctctatatattttttattattattatacttttaagttttagggtacatgtgcacaatgtgcaggttagttacatatgtatacatgtgccatgctggtgcgctgcacccgctaactcgtcatctagcattaggtatatctcctaatgctatccctcccccctccccccaccccacaacagtccccagagtgtgatgttccccttcctgtgtccatgtgttctcattgttcaattcccacctataagtgagaatatgcggtgtttggttttttgtccttgcgatagtttactgagaatgatgatttccaatttcatccatgtccctacaaaggacatgaactcatcattttttatggctgcatagtattccatggtgtatatgtgccacattttcttaatccagtctatcattgttggacatttgggttggttccaagtctttgctattgtgaatagtgccgcaataaacatacgtgtgcatgtgtctttatagcagcatgatttatagtcctttgggtatatacccagtaatgggatggctgggtcaaatggtatttctagttctagatccctgaggaatcgccacactgacttccacaatggttgaactagtttacagtccccccaacagtgtaaaagtgttcctatttctccacatcctctccagcacctgttgtttcctgactttttaatgattgccattctaactggtatgagatggtatctcattgtggttttgatttgcatttctctgatggccagtgatggtgagcattttttcatgtgtcttttggctgcataaatgtcttctttgagaagtgtctgttcatgtccttcgcccactttttgatggggttgtttgtttttttcttgtaaatttgtttgagttcattgtagattctggatattagccctttgtcagatgggtaggttgtgaaaattttctcccattttgtaggttgcctgttcactctgatggtagtttcttttgctgtgctgaagctctttagtttaattagatcccatttgtccattttggcttttgttgccattgcttttggtgttttagacatgaagtccttgcccatgcctatgtcctgaatggtaatgcctaggttttcttctagggtttttatggttttaggtctaaagtttaagtctttaatccatcttgaattgatttttgtataaggtgtaaggaagggatccagtttcagctttctacatatggctagccagttttcccagcaccatttattaaatagggaatcctttccccattgcttgtttttctcaggtttgtcaaagatcagatagttgtagatatgcggcgttatttctgagggctctgttctgttccattgatctatatctctgttttggtaccagtaccatgctcttttggttactgtagccttgtagtatagtttgaagtcaggtagtgtgatgcctccagctttgttcttttggcttaggattgacttggcaatgcgggctcttttttgtttccatatgaactttaaagtagttttttccaattctgtgaagaaagtcattggtagcttgatggggatggcattgaatctgtaaattaccttgggcagtatggccattttcacgatattgagtcttcctacccatgagcatggaatgttcttccatttgtttgtatcctcttttatttccttgagcagtggtttgtagttctccttgaagcggtccttcacatcccttgtaagttggattcccaggtattttattctctttgaagcaattgtgaatgggagttcactcatgatttggctctctgtctgtgtacagaactcttaacaatccatccacatgctataaaatgacatcaacttgggtgcattttaaaccctgagattacaggagtctgcaactacactctaaaccctgagattacaggagtctgcaactacactctgttatttatttctgccttctcaataattcctccaaattaagatttacttaaaagtttgatttgctacttaaaccaaaatttgatacagtgttttcctccttttactcataaagtatcatgtatttgccttttgtagaaaccaatcccttcattactatagttcttcagttgttccacagttcttaggcccaaactacttttggtgagctaggatggaatgaatgacacaaggtaaaacacccgtccatctgtttaatcgatatatattgacaacaataatacattgatagctttgagctaggcacagttgaggtaagggtgctgggtatagaaaaggcatataaacaaccacagagcaatttcccaaaatggttatgtatcaagacatttaggtttctttactgctaaacttcagggactttaaaaggctaatggacactgtgaaggtgagttaagatttgtactgtttcccagacttctgtgaatatctatcaacttctcttagaaattagtttttcagagcacagtttggaaaatgccactaacagcactataggatgtattatgaaaagtattcactaaggtcacttttaaccttctcgttaaagattatgcattgtaattttgtttcttttaaaagtatttcttattaagaagaatccttggaagttactgatactttggtgatgtgattttaaaaatatttttgagcatgactgctttttattttgacccttaatttctaagtccaatttttattaatgtattagatttttagaatattcatttacttttagtatcataaaattctgtgaaatacaactcatagtctagtaattgggaataccgtaagggcctgctgttccagctgatgattttaatatgaatatctgtatataggatttaactgtcaagttgctttaattaatatttattatgttgtgctggtccataaactattttaaccatccattgtatagtaatagaaaaaagtagaaattttagattaacttctgataagtgactttttaaattgtttaatatgtaactttttttaaaaagtatagtaaaaattcactgctagcatctgttttgctaaagtctgagaatgaaggaaaaggggtagtttatcatgagaatcatttctttacaaataaatactttaaatgtgaaccctattatatgtatagtcatacatatatatatacacgtatatatatatatacacacctacaattacttatttcttctccagtaaatatatgctaattttgttaaacttttttttagtgggaagttatatttctatagcatatttataaattgctgctaagattacaacaaccaaggcaagagaactgttaatactaacataaattctgacacaccattcttcttacttgatatgttttttgctgacagataacccgcatagagtcaatattgttgaagccctagtaacttcatttgaaagtcataaaataactccatccagtaaaacctaaaataaacgttcttaagtcctaataatcagaaatatttgtcaaattgaaagaatttacaatgtgtgtccctatcatatgttatcctcactgtcagcagggtatgtctggacatgtgcacagaaaagagaaacacttagattgaggacggttctgcctttgtctttcaaagtgccttccgctttacaatctatacagattccttgcaaaatcaagagtcttattcatttcctgctctaggtgcatccattttaccagggcctagagtatgaatggaaagtgctcctggagcatcatcaggccacattcctcggtgccttcagcccttctaaacctgtgtagcaagccactagcctcagttctccgtagccttaaatctcgcctcataaaccatctgggcgattaaaaaaatattttaaacattaaaataccaagtgccaaagaaggtgaatttcttaagcctagtggtacactgataagtggttagctaccaactcttgggagaaaaaagctccagtttgtagtgcttcccaatttttgtcatgtaatactcccatctgtctgatttcaagctatcaatgtgaagtcacttaatgctgagttggaatgagacgcacatactttgctcttttgagatgatatgaactggctccaggtcccctctgccagataaagttattaaacattgatcccataatttctgaaaaataggcataataagctatagctggctttccctcagaggtggtattatgtgtagttaaatggtccttcaaaatctatgaaattcctatttgccatcgaatacattataagaatacaattaaaagaaattttctaaacattcaataatcatgtaagaaaattaagcatattaagaaaagctttgaaaaattttataagaagcaaattattttgctgatgtaaatctgacataaatcatatacattgacaagagcattgtatgtttatgggattataagtttttaaagagtttccctgtatttccatggctttgaaaattatatccccagataaattgtggcatttcctttgtgcatgttggtgcaattttacattatgaaattgtcatgtagattcattacacctattttccaaacaaaaatgaccataattcaaatatgtacctatcatataccaagttctaaactgtataaaaacattctatcactaatgtatttgcaggcacattaataagatatttacccatttttataacaaagattcttggtcagaaaaacctcagaatttttacttttgataatctttctgtttcaggtaccagacttttaatccagatttgggagcatatatgtattagcttttattagagtacaatgggtaacaaactacctcaactgtttcagtagctttcaacaacatatatttttcattgtgtggcttgttggctactgtgggttaattgctctggctgcacttcaggatgtgattcaggttcaggtttactctattcaggccctgggctgaaagagaaggtcctacctgggctatgcccttgtagtggcagagggcactaaagcaagagaactggcagcactgggaaatgcattgaaaagctcatcaagtctgtttgcattgtgttgaccaagcaagtcatgtggctaaacccagtcattggtcagcaaagctactcttcctatagggaactattgtaagtcacatccaaaggttttgggaacaaataattctgaataataatacccaaggtactacaatgtactacaaatatttcagctttctgtaagtagccaaaatatcttaatataaaacaaaataacctcttaattttaaaaaaataagtataatattgaatacactggtttaggttcagaatttttagaaagatcctcactgtaagattttcccaaataatcacctaattccatgggaaataaaaaataggataaactaatagaaatatttctgaaacaagagtcatgaggaatccataatcaactgtgctaccttttgactatttaactttgcatctcaacttcctcatctgtaaactaagaaagttgttccacacttttacactgttggcgagactgtaaactagttcagccattgtggaagtcagtgtggtgattcctcagggatctagaactagaaataccatttgacccagccatcccattactgggtatatacccaaaggattataaatcatgctgctacaaagacacatgcacacgtatgcttattgcggcactattcacaatagcaaagacttggaaccaacccaaatgtccagcagtgatagactggattaagaaaatgtggcacatatacaccatggaatactatgcagccataaaaaatgatgagttcatgtcctttgtagggatatggatgaagctggaaaccatcattctcagcaaactatcacaaggacaaaaaaccaaacaccgcatgttctcactcataggtgggaattgaacaatgagaacacatggacacaggaaggggaacatcacactttggggcctgttgtggggtggggggaggggggagggatagcattaggagatatacctaatgttaaatgacaagttaatgagtgcagcacaccaacatggcacatgtatacatatgtaacaaacctgcacgttgtacacatgtaccctaaaacttaaaagtataataataataaaaaaataaaaattgttccaaaagctttctgaggtcattctcagtgtaaaggtctcattctaatgcttttttattgtcacctaattaacaaagcatatccttctgcaatttttattatagtttagctcagtttttcttagaattatggcagagcaataaaactttaattttcttttattcaaatccctcttcaaaaatggatttgagataaagtaataagatatgatcttccttgtttttacttagtattcaaatagtggaacctagctttaaaatagtcaagtcactaaaatactcttcctttacagtgagagtcactgatacaaacatgtatgtgtaagaaccatgtggaagcttgtttaaaatgtaaatttccagtccacaaacgcctggagattctgatactacaaagaacccagaaaactacatttttaacaagtaccccaggtttccaaagtgacctaagcagtacaaaccatataaattattttggtaatagtggggaaaaaaaaactttcacatgctgggatactacatacttagtataattaaaattagttgttaataccatgtgtctcattggtgtttgtattttatctttatgaattaatttttgtcactacatttagtgtattggactatacactagtccagtgctataaattatcactataagtgatggtattatgtttgtatataaattttagaaatgtagaaaccaaaataccttaatgtttgaaatgaaagtgctttgattagtattagcattccccagaaacatacagggtaggtcaatctcagaatgaaatactatgaaatgagaactactgttgagttattacatccaatctctttgcttcttccttgtttccttacaatctagtgctccttttaaaacatagtcagattatgtcatttctgtgcctaaaacccttccgaataaaaaccaaagccctttatctttgctacctgtaaaacttatgtccacagctccttcccctacccctatccccacccccagctctctgtactatgctccttgctgaaatgctccgcttaaagtgctcttccccatatatcttcaccactccaggtctcacttttttcaggtgtctgctcaaatattgcctatgcacagaggcctttattgaccacccaaaataaaacagcatattcccctctcctcatcaatcactagcccttgtaacttgctatatttttatttatagcacttataactatttgacatgttttcgtttgtgtccactcctctataattttaagctcctcaagcacaaggacttttgtcttggcactgctatattgccaggacttagaatagtgtctggcacatagtaggtactcaataaataattgtttgacaaatactggtgattatccacagcttggcctgtctccagtataaggcaaggctattaaaatccaaattttataaagtaggcaatgtttttaaaggcagttttattttctgttaatttcccatctattttgaaagtcattttaatttattactttcagaattatcccttttgcaaactctattctttccatctttttcttgtctgtttttcaaatatatgagataatttattttgaattatggcaattgaaagttgatatttaatttcaacgggttttaattacttatttgaaatacgaaactccaactatgaattcaatgtagtgaaaggcaccagatttacattcccataaaactgaacacttgactttcatggcgtacatatatgggaaaggtgtatggatggctaataacattcaggatttcctctgaaaactagaaatcttcttgattaaaaaactgactaaaagaataatttggccaggtgcagtggctcatgcctgtaatcccagcactttgggaggctgaggtgggcagattgcttgagcccaggagtttgagacctggctgggcaacatggtgaaaccctgtctctacaaaaaaataacaaaaattagctgggcctggtggcacacacctgtgatcccagctatttgggaggctgaggtgggaggatggcttgagccaggaggcagaggttgcagtgagatcacgccactgcactccagactgggtgacagagcgagaccctgtctaaaaaaaaaaaaaaaaaaaagaatttgttcctcagcatcctctgatacatgtactccaacaccaccatatgtactggtagaggttattatgccataaagatattcctgtctgtaataaaaccaaggttatttagacaaaaggttcaaaggactttgaaaattgaagggaaaaaaagtagctgttgtattaaatatttttagtaaaaaaagattgaaccacattaaaactgtccactttttaggacatttctcactctgtggcccagacttttctgcttattactttacacctgctctagtgcttggaaatgcccatgtgtctacacgctgtcaaatgacctacagatctgcttgggctaatgctcaagtaacacctgtcttaagaccttaagctcagcaccaaacagttgagtagtagacccagcagtttctccaaatgatgtacagctttagagtccagtgagatccagctatggaatctcctatgttagcacacagaaaagtcaattccctcaaaatatggtttgttcttgtgtcattttattaccagtcgacataccctaaattatcacgtaagattccagcttttatgtaatcatacctagtggcaagttcattacattggaccacttctatcatagaaggggcagcattttgttctttctggaataaacactttggatgtggatttgccttccccgcacacaatgcttctgccaaaactaccatctgtggacttatgaaatgccttatctgccatcatagtattccataaagcattacttctgatcaaacaaggctcatgagattcactggtcttaccatgtttcacaccatcctgaagcatctggcttgatagagtggtggaatggccttttgaaggtcagttacagtgccagctaggtggcaatactttgcaggactggagcagggttctctgggaggctgggtatgctctgaatcagtgtcaatatatggtcctgtttctcccatagccaggatacacaggtccaggaatcaatgggaggaaatggaagtagcactgcttgcttttacccctagtgacccatcagcaaaatttttgctttctatgaccttatactctgctggcctggaggtcttatttttaaaaggaggacagcttccaccaggaggaacaattattccattgaactggaaatcaaaactgccacctggccctttgaggttccttatgcctttgagtcaacagacaaaaaagggcgttgtgatgttggctggagtgattgatcctgattaccaaggggcaactggactactaatggaagtaaggaagcgtatgtctggaagaccccttagggctggctcttagtattaccatgctctgtgattacggtcaatggaaacacaaaacaacccaatctagcagaactacgaatatcccagacttcaggaataaagatttgggccacccaagcaggttaagaactataatcagctgagatgcttgctgaaagcaatgggaatatagaatgggttagtggaataaggtagttatgaatactagctatgaccacatgaccagttacagaaatgaggactgtaactgtcatgtctatttcctcatattgttttgaatatgtgtatgtgtagcaaacatctgtgttttctttcccctgttatctctctatcatgtaatataagatgtattgactttatgtcatagtatttaagtagtgttaactttatagcatttaggttatgggatgtggagaagagaaaacatcatccaaggactttgcatccttttctgaggaaaggttgtatttttggttgtacatagggtagttgtatcattttaggtggaagtatgatgatatagtttggatgtctgtctccacctaaatctcatgttgaattgtaatcctcagtgctggaggtggggcctgatgggaggtgtttgggtcatggaagcagatccctcatggcttggtactgttttcacgataatgagtgagttctcttgagatctggtcatttaaaagtatgtggcacctctcctaccccacctctctctctcgctcctgcttttgccctgtgaaatgcctgctcctactttgccttccatcatgattaaaagctgcctgcctgaggcctcaccagaagccaagtgatgttagtgccatgcttgtacagcctgcagaactgtgagccagttaaacctcttttcttttattcagttaccggtatttctttacagcaacacaagaacagcctaatatatatgactttgttattgtctttatatgatgattaagtgtggttcaaggagatgcatatgggtgccatcttggcaaggagtggacttgtgatggttaatttcatctgtcaacttggctggaccataggatgcccagataattagtcaaacattattctgggtgtttctgtgagggtattttggatgagagtaacatttaaattggtggactttgtgtaaagcagattgccctccgtaatgtgggtgggcctcatttaatcatttgaaggcctgcagagagcaaaaagactgccctccctaatgcaagacagaatttctccatcagcctgcctttggacttcactgagacttttgactcttcctggttctaccacagactgccttcacatgcaaattgggatgctggctctccaaactgctggccttcagactggaacttcagagcatcagctctcctgggtctccagcccaccagccttccctaaagattttgtacttgccagccttcataatcacaggagccaattcctataataaatctctttctctgtgtgtacacattctattggttctgaataactaatattcttcccaataaagccaaaaatgctagtgacctacaaattatatacaggaaaagaaagatattttattaactggattcaaaacactttacaggtactaaaggccatgactcagagctaacagaagtttgcattatatacactttatctgagagatctagtcattcattgggtgttaagtgtgtagacttttctatttccatgctcttgcctgccttataaacgtctacttaatctttataataaacaccatttttgtaggacttttgcttaagaatatttaagttaaatattttatcactgcattttaaaaaactctgtaagctaacataacactgatacacaaatctactttgaactttcatttattaccaataatggtaatttagtttctttttttataaaatgtttttgatgcattcagcactacctaatatatgtaagctgaatacaagctaggaagcaaaataaaaattacattaaatatcttgctactacattcattaaatcaattatatatgatcctgggctacagaaaaaattacaaaattatgaaatatgttttgaaaataatctcagaaacttgtgagatattgaggctctgtagaacagtttacaaaacaaaatgcaagaaattatgtatagcattcgtaggcttcttataagaaaaaaaagcaatttttgaagttccttcaaggacaaaagataatggatgtttttatagtttgcatctggactaactctattagcatcattagtggtaatgtattccagaagccatttaatgtaatgatgcagataatatttttttcattaagaatgttgtggaatttcaaataacatttttaagatgaaatattttaatattttaagagcagttttctcaaaagatctattaacctatatagaaagaaataggaaaactgtaggttaagagactactaaaaatcttcacttttgtaactcacctacgaattggtacaaccaataagttgctaagacagaaaggaaaaagttcctttacttttatgtcttagcctagagatgtttaaaatataagcattatcatattaaaagtacgttaattatcatgcacatgattcttaattcctttttttttcctattcagtcaccttttaacgtttcttgaacctccatcctttctttggaaaaacacccctctcagactctcaggacatgtggtttgggtggggctatttccttggttttaaagattgatatatgatgtggaaactaggcaatcaaagcacctccccacttccacactccacgcccacgtgcttgcatgcgcgtgtgcacacacacaaactcaaaaagttttctgggccttgggtggctgggacttctggtagtaccaaatagatgcctagcatactaccaagctttctagacaacagaatgagttcgcatgccaggaaaggaagagagccagactcagtcctataatctaatttgtcctcatggatagagccactgcagaagttgcatgatctaataaatcttctttgcttgagtttttcgtttgttaagcctatttagtttcggttgtttgcaaatgaaagagtcctaatagtcatacactactatttttaaaaaatatattcttataagcaactctttctcctacccatttcttaaaaaggacaatatccctttgtcatttccaggtgttccccacatcctacttcttcctacttcttcctgctatcatcctacttattcctgctaaatatcattttctcacattaataaacactgcagaatcattttcttatattacccctcctaggtttgagttcttttccaactaagaatttaaattgagtcagcttgcacctaatattcacctgcttctgttcttctagaagttggtatgaatttatggacttggattataaattcctcatggcaattacaagtaagattgatatttgagtagttcacggttccccacacacttagaaataagtgtcaagcagtatcatttggactggttagttgaaaattgtatctagtgtaaagtccttcactcacatttgacatacctcagaggattgtaagttgggcaggaatggcacctcaagaacctttaaatgttgagttttactatgatgcagaacaggtaagattttttttctttgtgaaaattttcctataacttgacctcacagtgaaagtatgctaaacttacaacaaacccattctcatatcactctttcagttatttattgctgcattgtgacccttcaaaatgtatgtcttgaagcaataatgcttatttctcatgattctgtggactgtttgggcaattcttctgttctctggaagtgtgtatgtgtttgtgttgtgttggcacatatcatgtacctgagctcacttggggcttcaatcagctagctgattggctgggattagggttagctgggttgtttgctgagtacctcgtttctgtcttctctcagcacttccaagactgcaaaaatagaagttacaagatctcttaaaacgtagctttgcaagccatccagggtcatttctaaaactgcattttattaatcaaaacaagaatcagcccagcttaggtagggttggtgatggtgggaataactttaccactttatgagagatgtggcaaaatcccactgtagaaagtgtgcaggatggaggctattgtaaccatctttggaaacaaggtaccacacttatttttatttataattggagaaaaactccttttgatgcatacagcagaattcttcctgaatcacttgatactcataaaagtattcaaaatgaaaaataatgtttttcattcagaagtaaatatttctgaagtggaaactattagaacatgcagttatttataagtcacacatatgctgggatatttttctttttcttatatacacaattgagctgataatctgtaaaacatgtaggccttgctcttattcaaaaaggcaaaacataaatattgttatcactatccattctgtcttttacttttctctgtagtgtttcaattttttgaaaacataaatggtttggaagggccatacaggcctttaaaccaaagtattgcattatgtaagtctgaaaagtgcagcagtatatgcaagatgcttgtcttttgcatttgagatatttttaaatgttctatgaagtgtgatttattcaaaagttttacataatttatatagttttaaaacaaaaactctcaagaatacaaatatgtgtgtaaaaatataaagacattcatagaaatggtaaacaccaaattcagcatggtggatacctcgggtgaagaagagaggaaaaggtgatcaagcagctgtaactcaggggaagtaacatgttggcaatactttatttcttaaactgtgtgataggtgtgcaggtaattgttaaatttttctttatatctttctatggaaaatactgcaaaattataaagagaattttatattttatatttatcatctaattaagatgccatcagatctatgctacatgaagctttttcagaaataaacttttttattggtttctaaaatgttgcctcactatagagataattctgaaaatttagcctcccatgcggtaccatttcataatagctttttccttttctttccgatttgagagaccatgctaataacagcagagaggcagggcatcctgcaagttttcccactccatacatgcaccttctaactcagagccaatagcctctctagtccacttagttgcatctgagaggttatggtacattttgtgaaatatacagggggtatatgtgggagtagtttgtctacatctgaaaaaatgctagcaaaatgactccgaaaactttaattcccttaacaaattagagcaaaattttattctgacaaatgttacataaaataatttcttggttttttcccagtagcctaaaaattttaattttttttttttttttttttttgagatggagtctcgctctgtcgcccaggctggagtgcagtggcgcaatctctgctcactgcaagctccgcctctcggattcacgccattctcctgcctcaacctcccaagtagctgggactacaggcgcccgccaccacgcccagctaattttttgtattttaagtagagatggggtttcaccgtgttagccaggatggtctcgatctcctgacctcgtgatccgcccatctcggcctcccaaagtgctgggattacaggcgtgagccactgtgcctgaccaaaaattttaatttctaactaacattttcaggtgaaaagtttttttttttaaaatatgaatgctatgtagggagcttccaagaaaaagaaattaatgacctctggttagctttattttaaataagaagtggaaaatagaactaacttaggttgactatctatagcacagagaagaagaagagaaattatgtggaagtcagttcatgctctgtttttatttttcccctagctttattaaggtataattaacaaataaaaactgtgtacatttatggtatataacattttgatatatgtatattttatgatatgattacatcaagctaatatatcatccatcgggaggccaaggtgggcgtatcacgaggtcaggagattgagaccatctttgctaacacggtgaaacccctatctactaaaaatacaaaaaaaaattagccaggcgtggtagtgggcgcctgtagtcccagctactcaggaggctgaggcaggagaatggcgtgaacccaggaggccgagcttgtagtgagctgagatcgcgccactgcactccagcctgggcgacagagtgagactccatctcaaaaataaataaaaataaaataaaatataaatatatatattccatcacttcatatagttgtttattgaggtgagtatatttaagatctaatctattagaaattttcaagaatacaatacattgttattaactgtattcatcatgataaacaatagatctctgtaacttagtcaccctttctaactgaaactctaccctttaaccaacatttccccacccctacctccagcccctagcaattaccattttactctctgttctatgtgttcaacttttttagattccccatgtatgtgagatcatgtagtactgtcttttggtgctttgcttatgtcatttaacataatgttctctacattcacccatgttgtcacaaatgacaggattttcttcttttttaaggctttgtagtattcgtgtgtgtgtgtgtgtgtgtgtgtgtgtgtgtgtgttattcctttatccattgatccattgatggacacttagattgattccatatcttggctgttgtaaataatgcaacaatgaacatgggagtgcaattatctctttgacatactgattttatttcctttgaatatatatctagaagtggaattgctggatcatagggtagttctatttctttagttttttgaagagactccatactgtttcccataatagctgtactaatttaatttcccaccaataatggacaagggttctcgtttcttcacatcctctccaaaacttattttttctcttttttatagtaaccattctaacaggtgtgaggtggtatctccttgtggctttaatttgcattttctctgatgattaatgatgttgagctttttttcatacacatgttgaccatttatatgtcttcttttgagaaatgtctattcaggtcctctgaccattaaaaaaataggctgttttcttgctactgaattgagtttcgtatataatttggatattaaccctttatcagaggtatggtttgccgatattttctgttgactctgttgattgtttcctttgctgtggaaagctttttaagtttgatgcaatcccatttgcctgtttttgctttcctgcctgagtgttatggtcaaatccaaaaaaatcattctccagaccaatgtcaaggaactttcacactatttgttcttctagtagttttacagtttcaggtcttacatttaattctttaatccattttgagttgatgtttgtatatatcgtgagatacaggtccaatttcatttttctatgggtggatatacagttgtcccaacataatttattgaagagactatcctttccccattgtgtgttcttggcacctttgtgaaagatcaattgactgtaaatgcatggatttacatataggctctccattctgttctattggtctatgtgtctgtttttatgccagtactatactgttttgattacttaagcttagcaacatactttgaaatcaggtagtgtgatgcctctagctttgttgtttctgctcaagattactttagctattcaggctcttttgtggttccatacgaattttagaatttttttttctatttctttgaaaaatatcattggaattttgatagggattgcattgaatctgtcaatcatttggggtcatatggacattttaacaaatatcaattcttccaatccatgaacacaggatatatttcaatttatttgtgtcttcaatttctttcatcaatgttttatagttttcactgtacatctttcacctccttgattaagtttattcctaaatattttattttttggttgctattataaatgggattgatttcttcatttctttctcagattattttttgttagtgtatagaaatgctactgattttttgtatgttggtttatattctataactttattgaattcatgtattagttctaaaagttttttgatgtagtctttggggttttctatatgtaagatcatgccacatgcaaacagagacaattttatttcttcctttccaatttgaatccttttacttctttttcttgcttaaatgctctggctaaaacttacaatactatattgaatgaaagtggtgagagtgggcactttagtcttgtttttgatctaagaggaaaagttttccatttttcatatgctctttatttaaaaccaggtaatctcagttactttacactatattcaagagaatattgacatatttgtattccactggcccctattcaaattgccttcctttttcctaactgaaatcaatacagtataccactcctatcttttaaagtctaggaaaccttagaaaggggtttttgtgttttaggaagtgatattaagtataaacaaatgtcttctccccaaacatgacctctcatagttttagttgactgaatgtgttaaacaaggaaagtttaatgtatgtctaaatttctttaaaatagactcctttctttagctgtcttagaaacaaataaacatttggatgaaaatatgtggcagaagatacatgaaaaagaagtgatatgtctcaagcaggtctcattctctagcctgggtgctgttcttctataaaaatttctccacaccatggatagcacctactacaaatgaaaaatgtgagacctcagattcacgtacgttttttcttccttcacattcttgcagttacagaggtaccatttattagcatgtattcttaatgaaatttcctgaattgaaattaagttgtttttactagggtcagcattagaggtatttcagtaaatagttaaatgttgctgaaaaacctgctatcctggtgacttcgtgatattcctgggagggggtgggggagatggaggaaggaaaagagaaataaactagtaaaattagcacatctaaaactgaacacaatttctacaattctcttttgttctcatctgtctatgcttgtccattttcttccttaaaaatgtaatcatggtatcaccattcttttgtctttttttccccctacagccattcaggcaccagtcatttgcctatccttttcaaatttccctgactgaccactttgagtcagatctacaccagcaacctcctacctagttaacctccctgctttcatccttaccactttccaacctatccaatgcactgtgccaactctcttccttccaggagcattatttccatcggatctccccctctacgatggctcttaattgccttttgagtctaattaaaacttcttccagaccctctaccaattaactccatacactgtttcccttagcagccctctcatgccaggtgccagctcctgctccccggcccagcccagcaaacctgctcgccctctgccttttcctgcttcctgcctcacattgtgccagttcccttctacccagagtgcctactccacttctctcttctttctgccaaagcattcttccttttttgtttttgagattgctaaatcacctcctaactaactttgattactctaagggtcctaaagttctgcatttaggtctgttcttttggaaatgcgtgtgtcttcacgtacctgcattatcgacaccttgcagggagcagtgcccacatatcctggttcagggactccggcgcttggcgagaagtccggctctttggggctagtggcttggtcttttccacgacctggtgaaagttcctctactgccaaggccttggctcatgtcagacctgcattctccctggatgttctggttcctgccttgacttccctttcccgcccgtaatgtgcgctgccctggaggtctcaggcagccacagcccccctctccccccgaccccattgcggtggaacaccggaagggtcagggccctccaggcgttcggaaggcaactatgtaggagatagcacgggctggggccgcttggggaggggactataggctgcaggtggcttcccggcagaggccgcttcctggtcttcgtgaggcggcttggcctgggtcctgaaaggtggcggggtggcggggggagccgccaagccgaggccccgctgctccccgaggccccactgctcccctctgtgtagcggcttcagacccagaccgcctctcgtcacccccgtgagctcctgaggacacgaagtgttcataactcttgaccccagcacagcccaggaggccctgcgctgctcatgcggcaagagggaggccgggagggcggaagcgcagccctctagcctcccgcagcgaagccgttccttcgtccctgcttcggccatcggagcctgcccgacacacacaggagccccggctccccagacgccaggcctggctgggcgtcccaggggccctccgctctcacccaaaggggtgcctggcctaggcaggctctgctcgagtggcggagggacccccacattgcgccggcagaatggcccttggggaggtgagaggactttccgagtggaatgggacccctaagcccactctaggcaccggctttcaccgcagcgccactcccggcgactccaggatgtcgcggggcgcctgtgggatccacagcgtcctgatttccaagtccagggactggaggtggccctgggccactggggctctctagacgggaggcgtgtgtggattcgtgaaaagctgcgggtgattagtgctgctgctgtttcgtgtgtgtgcttggttttaagtgcatgagcctagtattctcttcctaatccaggctgctataaatgacaccacagatggacactataaacgtcaggagtttggaagatgttgaagaaatggagtgctttgcaagagtacggggctagccatcgcatcacaggagctacagtcgctgcagtcactggtatgtggcgccaggggcccgactgatcgtttcagctacaagtcaggacctgaacatgctaaacacaaaatgtctcctgagtggcagccccaatttaaagctaagcagaatcggtggtgccttccctggataatgcaactgagatgactgtcctgcatttctcttcccccacacaaatagacgtaaggctatatggttatttttaagttagaaaacatttcttaagccgggcacagtggctcacatctataatcccagcactttgggaggctgaggtgggggaattgcttgagtttaggagttccagaccagactctgcaacaaagtgagacatggtggcacatgcctatagtcctagttactgtggaggctgagatgggaagatcccttgagctcaggagttcaaggctgtagtgagctatgattgcaccaccgcaattcagtctgggcgatggagagagaccctgtctcaaaaaacaaaacaacaaacatttcttattagtcacagcaaagacctccattggagttggcaacagtagtgcttcaggttggatttgcggtaatttatacaatgctttcatatacattatttcatccgagccttacttcaaccctgttgcaaagtttaaaaaggaatattatccacattctgcacatgagaaaactgagatctgaagatgtcaactgactttcccccgttgctggttagtaagcatagaagtatagacaaacacatgtgttctgactgcaaatcctttgcccagttccattaatactgctgggatctgcctgaagtccatgtcctttctcttcttctccttgtcgtgttactttggataaaggcggagggagaaaacaacattcatggtgcaaatggcccatagtatgggaggacaaatgcactgggctctgagggaagcaaagttcagctccacaggctgaactgatacctttggtgggagtttctaggggaatgttttccctagtctggaaaattcttccatggatgagtttctgttcaagtgatccactttttaaaaaactcacttttgagtggtaaaactgaacaaacctactatagagcaagaagtgtctgatgaaaactgggctgggttaaaatagcatttgctggactccatttttgctgattgaagcattgtacctgttattaaccgtggcttctaacctggtattctggtcttaatgcctgccaaaagctgaggctccttagagagactaaagacttatctgctacagcctcaacatgtaggaactaaggaactggggaagtgattctttcttcctacctttgggaacttttctggtatagaacgtagtgtcttttctggctaaacttttcaaatatctactcaggaattacctagaactaaatgtttagaaacccttgtaggggtcatatgcgtagtcaccttcataagtgtttgcctaggaggggttgagggaaagaatgtagagtgaggaaggagaggagtaaggggaaggagaattggatctgaaacaaaaacagttgtgctgactgggaggctgtaaaatcaaaggtagttccgagccgatgccactgtggggcgccaaagttctactcggctaaggcccgccgctttcttgggtgcgaggacagaagtcctggagaacagatgcactgagggaagagagcggggaggaaggagggaagggaaaggaaaggaggggtggggctagggtgtcctttattctccagttaaactcgcctgggagactttgttacataacaagtctgtgcgtgggggaaagaagactttgttagacggaaagaaggagggtgtggggagggggtgaagctcttagaaaagaagaaaatctcggaatactgagttgacttgggagcacaaacggtcctcgtggcttcagagacgctggggcttattctcaaactggggccaccacctttttaaaagggctagcgaggaggggagataggtttggaaagggtaccttccccgacccgccacccaacacatacaaaccatagaccccgcccaacctcccggcccctggccccacttgctaccccctcctatgcctgggggctgctgcctccacgaagccgggctctttctcctccgggtagccgcggctccatctgcagcccccgaggactcctcagccgggataaagggcggcctcccccgcctgccagcgcccaggatgctcagccgtcagctgcggggaggcgctgatttcattccggcgcggctttcgctgcgggcggcgaggggcggacaggccggggcccgcggggcggggcgggacgggggagggaggcagcggccgcgacctggggaggctgagcgccccggccccgccaggatttattacatcccagccactggcaaaggttaggaacgcgcatttggagacgggataatccaagtttaaatattaaaagtaaaagcagaatcggtcgaatatttacctagagactgagcagatcagatctccctttgcgaggggagaggactgtggaggagcccggctcccaggcccgcggctctagcgctgcgcttccccagtggcatcgcctgggacggccaggacccacttctgaagcttcctcagactgtggttaaggggggcggaccgcggatcccctcgctctcccaagtctatcggagtcggtggggcttggtccagatcttctgctttgtatattctcttttttaagggcctcccggaccaacacaaaaggtggcggaaagtacgttggatcaatagcaaagattgttatttagataacgaattaatctccctgttatagtactttttgtagtgaactttgcacccctttcataagaaaaaggaatttagagagagaagaaagtctcaaacaggattaaggttttaattacaattccctatcgaaatagtatgtttgatgagctgatcttatcaattaatagtaacattaaagcacaagaaacagattcacggaaatatgcttaaaggagcctttaaaaagtaatcgcactcggggaactagcggggcaggcggccagcgatgctgcgtccgagcagatttcggaacccccctctgctcggactggtccaagcggggcgcgcatctggggcgcaggatggggcgggggcggcgggcacggcgctgggagaccaggctacgctggtgggagggaaataataaataacagacgcctcttccaagccgaggcccacatcaaagttggggccccacaagggccgtgcagttcactgcatttgggtcagcgttatattccaggggcaaataaagtaatttgaacatgcaccaacagttttccataaaatacgagttaaaagaagtaatagaactaatcactgtctcctcaaatcaagtagaaaacatttcaatgcactaattagagtaattagaataataagcctctgcctatatgtggtaagacaatgtgtacaaacaactttatttaatgtatactggtaatcagcgatgcgtgcctgcttgaatgcttagcgcaataaaactaccctccgtccgcccaaacaatcaaacacaaattagtttaatgattgtgcctgctgaatgtcttagaaatctacaggcagaggcgagtaaatagaagcatccttgtttgcgtgcgaccccgcccgggctggccgcggggccgggtgagtggccgcgggcgggtgcggcgggagcaatcgggaggctccgccgagcctgcagaggccaggcccggcgccagcacagacctgcgccccgcaggagcccctgctgctgcccttggtcgccttcccactcctctccggccagcttcccgcctctgcggccctgcggtgcagttctgggccccaaacccgcacatccccagctcggcctcacctcctccgagaggcgaaaggccgctttagaactctcccaccgcccgtttgcgacgcttttcagagctgagtgatttcctctcccggggcgactccttccaggggcctcggagggctaagggggatttctgcgggccctgagagcccccagttcgcggagatggactctaggcctccagtactgaggcgcggcccctcactttccgggccctcagctctggcttgagatgccggggtgcccagagggtctcccgggctcccttctctagggaactgactttaggcccagcaggggagtggtttccagggggtctaagaattcgttttcccccgtgcttcagctcttaaagagtaggttcctcttcattggaagcagggagctgaggtcagaaacacccagaagtttgatgggtgggagctgaaggaaacctgcctcagaactttgctccccagctctcagctgtcccccttcattctcacaaataccgcccgcccccctcaaaaaagcaggaaaagcccagattactgtacttccctgggcagctgtccccctttcctctccagtcttcctgcacttgtctcatctccctctttctcttggggcaccatcttccacagttgcctctgccatgcaggtgcaatgtcctgggcccgactctgcagagtcaagtggaaaagccgggcaggcaaaaagctaggagactctcctccgggcctcgaacccttgtcactcctaggcccactgcacctctgccccagccacgcgtgcccccagagagggcttgccaactcctgcgtctagagcccactttcccggggcgacggctatacccaagacatctggactcctaatcgccaccgctagcctctgctgggggcaaacccaccaaccgtgcccgttacccctagcccgcttccttgggaagcgatagagtggaacagctcgacgtccgagctgttgacccttcccctgggggtccgggcgtcgaagcctggggagccgcagagaatccctgatttccaggcaggaactcaggggctgttggcagcgtcccgagcgaaggccggggctgggagtgcagggagtgccccgctcctttccctgtctctctcctccccgcgcggccgagctaggctgtctgggccttcgcgacagcggccagggtccccgaggtggggggtgcgcggcaaggccaaggtacctcttttgcgactgggcaaggagcagatgttggccggcagcacactcgcccgccttgtccaggtgctgcaccaattttgaagcaatatttgttaggggaacaacatcaacaaaaagttattaatgccaaataattgtctccagaatcatgtgctgtagaacataacagttcccctgacgaaatgagatttcttaacaggaggaggaaaagaactcctaacactttccacatagatttgcctgaaccttgaagcccagtgatttacaatggctaatttgtgttacaaacccacaagaaactttctttttcccatcctcctgccaaagtctctgtggccatattttttgttgtgtggcctttttttccttctttcctttttaaacaacaaacccaaaggaaacactggtgggaggaaaaatacattacccaaataaaaaaggacgcaaattcaaatttagtccacagtgagatttcctattgccgtcgctcgacacacagagagttaatcttatacaattcataacaatcaaaatcccctccatatccctcagatggggtcctagtgctcccctgtcttcctaaaattggtgacaactacgtctttgtgggggatttatttccttctttttttctaggtgacagctccccattctgagagcagagagctgtttgccgccaactagagaccactccagagcctaggctcttcacgcacaaaccgcatatggaagtccccccctccccaaatcccagacaaagagctataaaaactcagaaagacatggaaggaataaactttaggctatagatgcacttttactggtgtattaaataacatttcagaccttttttttttaaaaaaaagaaaggcaacttaatcttaccaacaatcagaattctaggaacaataaaagaggccaggattgttttgatgggatattaaattatttctaaaacctctaacagctaagtcaagcagaggtgtctttaagataaaggaaggtactatatgattaagtttattaacttttcttcttttaaaggagggaacaaatttcccagtttcccaccaaacaccagaaaaatgttaaaatattcattgtttccttatctccttatcagccaagcaaggccttaggaaaatgaaaaaagccattttctggtaccctcatgcctgcctgataaggaggcattaaaataacacaggaccagttctgaaaacctgggtcagttaattccatgatttgttagctgggtggcaggcccctgccacttttgccttgtttcccatcctgaatcaaatggtgggaataggtagcagaagccctgattctttcctatggccatctgccccttgttaaaagaatatgcatcattgaaaagtaaactttcctaaacagggaaaatgtttataaaaaacttagttgtacattccatttagttataatatcaagattcatagtactccaagatgcatctttttctttcattttaaataaacactgtcctttgccctactcactgaaatatacaagcagacccaaagaatcacttttacctttgaccctcacttcaccagccttctttctttttctgtacaagttccattctttgcctgatttttaaacttgtgttgaaattcaatagaatgtagaacagagttctataaactgtttgaaaattcaaccaagacaaatcacagagactagtgatagaaagataatttaacctggctccccagcactactcaaactgcctccaaagtaaggcaagtgaaaagcaaatgaatgcagcatatagacatacgtgcaggtaccaatgcacccaaatgccaccccctcccccattgctgctgttgcatctctttattagttgcttttgaaaaaagaaggtagatgagtgtctttaccaaagccatttcaccagaaattttgccaaccagtgtgtggcctccactggtaggagcaggaagggaagaggaagagaacagtgcttttgttgctaccatctgaaatataaaggcggctacttcgtgggaaccgagaatgtttaggacggccaaacgtaatattatttgtggctattccctccatctgaccttcacataactctttttcacatggtcatttctcccccatattattacataaattttacaagtaacatattttgaagaaacacaggaggtctttgggatagctgtattctgcattgtcttaggagaaagaaagggtttgttgtgacggctagccaacatcttaggggcaactgccccagaaatttctcccagtggcagtgatggggttttccaccttagtgtgtaatacattccccaaaccagtgtggcaactattcgagtagccttaggatctgaacagaaagcatgggtcaaaaccatggtgtgcacgtttaacatgtgatggtttccactcagcagcccctgtggctaagaacaaaaatgccttctcaaggtccactaaaatgccctgcagagggcagatgctgcttgttttctgcctgcagtggaggagaatattgacccagaactcaaatctatacccagcttaaacattttacccatcagcatatctgcggtcacaaaacacttcttctttctgtcgcttctcattcagactattgataagatcatttggtggaatctgtttgagacccatgtaatattgactaggagttagaaaagatgatcagatgtaataagcccagaaactacttttcaaaatggacatttatacttaaaccaatgttccaaggagggctttaaatacatcagcaaacttgtaaactgatccaacactgcttgaaattctcactaaccttaaaacggattttggtactgtttcatctaagattgtctgaaacaatctgttattagcatcacggcttgaatctctcccatatgttctttttttttctttacttgctttaaagcccatttgtatgcctaatgaaaaatagacacaattgtataaaccattgtaaaattcatctttttatgcaaaccaaacaggaataatgtataggatctacttctaatcatttagtaaactcacaatagtatactatcagggttattctttgttaagagatatttgtaaattattaaaaataataatctactaaatcctgcttttctgtagatcccaaattatttgaggacctatgggtagagatcaaagtccacctagttccactgatgttctccaaaacagcacaatcgaataaggtatagttaacctggaaagaagatgcaggcatatctgcatatgtttaaaggggacaaacatctctttgtaggaccatgaaatggcaagcaaattgaagctcaaacccaatgaccatttcaatttaatgctacaggcatagtgactgaaagatttgggactgatagtttttgcaaagtaaagtgaattagaccagtagtctccattaaaaaaaaaaaaagcctctgaaagttatgaacatcaaatctggcagtatatgcataaaatttattccaaaactttatgaagtataaaggaagggaagtgttttacacacaactcaactcagtcaatttaaggtctagggttttccccccttaaaacttggcactatctttaaaaataaaataaagatatttcaataattagaacaaactatgaaggtattgtgcatttctgttttatgtagataataaaatattactttaacataaatatataaggatctctgcgtttttattttccccacaagcacaaccaaatgtaccaaaacaaagtattttttaagagactgaacaaaaaaattacatcccatatagattttgctcacctattcatttaaagctacagaaaaacagtttccagaacctttttgtttcaaaagaaataaatatacattgaggcaggccacttaaaaatgatatgaaaatatttccctgggtagcattaaaaaaaaagaaaaatagacaaagaaacatttaaactatttctgcatttcaaaagacagatattaaacatatatacatagtggtaaggttcagtggtaactttcatcttagtaaacctataagagtcagagaagctgtagacacattctctgaactccagcttctgaccttacctacttggtaataagtatctggaaattcatttcctccctttaccagtggctatttgccctgctctggatagcttcactaaaggccagttcccatacctcaggaacgagcagcgtgatgcacccgaagcagctccgtgcccatctccttgtgacattcattgggggaaatgaaatacaggcaaataaatatgcccattataagtcaccatttatcttgcaaaaacatggaaaatgaaacaatcacaggtgtttgaaaagacaatataaagcatatttcctaaaaccttaaagactactgagtgcaatgctaatctgatgctgaaccataattttatggtagtgagactttcattttttaaaataaaaatttatctaatacctaactggaaaaaaacccccaaacttttaagattaataaaaagtgttttcccttttagcgcccttttgtgctgatttttcttttaaattttaactgatcacagtttaatggtatttattttcaatacagttacaagttttttcacctacactttccagtagagtcttttgtgtttggagttaaccgttttccattaagataaggtcaaaaattcacttaaaactattaacaaaggggagaaaggaaggattgaaaatggcatttttttttttcacttcatttgccttccttagtgaaagagggggcagaaagctgtccaagtcaaagtggtgtattctgcaataaattacaggaaaagagggtgtgggaccctaaatatgacttgataaacaaatgagctagtgaagacaaaacctgtctactgcgtggagatcgtcagtgtatgctgtgggtatctgtgtgctaaaaaacacagtcttatgcatacactattaagttcctgggtctttttttatgtaaaaaaaaagctattagagaaacaaagtttaactgctgctgtcagcacaaataattcttcataattgttactaaaactgaaggtagagaactatatagggatatctgaagatatgtacttccctagttctcttcaaagtgccactttctttctgctggacaactctggaaatatatttaacctccacatttcccctgagctctttcacaatgggcccgcctgataaaatgaagcaatcagtcactcactatcgatttttcttttttcttccctccataacctcccccagaaacactgcctgaaaatgaagtttactttgtggctggtaagaacaaccaatgcttatttttatattccaaaccggattcttgccttcgataaagcgggtagaccatgcacatttcctgaaatcagagaattgtctattttgtatgaagccaatccttttgctttggtaagaggaacaaatagatgttacaccctcgtaaggggaatgtgaaggtaaccaaagttcacaaacagtacgaagaaggggcaacacaagaacattagaaatggagagtggccaagagctggcttcaactctctccgatgaataaagcaaagcaaaacaaaatcccccaaaacggcaactcccaaattaacggtggggagaaagagaaaatatgctcatgaatttgttcacgtaaacttcaattttcttgcagtgcaaatttatgtggttaaattttgcctatatgaaagaacatgtgtattttttcctctttcctgatgggaatccacaataaataaacacagcagcatgtgccaactctaagcatcaggaagctgcattttgtgtttatcatggtttggtggattttttttcctttttggtaatttatttagttttgccaggtatttatctcagtgcttgccatctctctgtctctctctctttctagctatcacacactctcctcactctctccaggagacactccactccattgcctggttactcgcctgcaaaggtcaaaacacatcattacacctgctacctttaaaggatagtccagtgtcttagttgctttccttttgccttattttttttgtctttttaagggacggggaaataataattaaaaataaaagaacaatcagaagttagagagggaacaagagggccgggaaagggccaaggaccgaaggggagggggagccccgcgctctgcccctcccccagctcgagttcactggacgggcgtctgcaccccgtggtgtggtggagtgtccctactccccccgtacacatcctcggcgcccggcagagtccctccgggaggggtcatccttttctctttctgtctcctgttacaaaaccaaactctcaccacctccttctccagctgtaagctgtccgcgagggaggtgatctcctgggccgagggcttggggcatttgaggaaatggctctccagagcccccttgacgctcacctcgatggaggtccgctttttccgcttgcgcccttgcgctgcgatcttgtctatgctcgtggggctgcccgaggacgagtccgcctcctccaaccacttgttcaacaaaggcttcagcttgcacatgttcttgaagctcagctgcagggcctcaaacctgcagatggtggtctgcgagaacacgttgccatacagggtgcccagagccagccccacgtccgcttgggtaaatcccagtttgatccgccgctgcttgaactgcttggcgaactgctccaggtcgtccgaggtcggcgtgtcctcgtccgagtgcgggtcgtggtgcgcgcctgggtggccaggcggaccctgcgggggcggcgggggcggcggctgctggtgtgggtgcgagtgcgggtgcgggtggtggtcggcatggtgtggctcgtcgtgcgcgtcccgcaggccgtggtggtgcagaccggccggctgcccgccggcgcccagcatgccgttcaccgtgaagctgggctgcgagtagagcaagccgccgttggacgctcccatggagggtgggaggtgcgctgcagccgccgcgctccgccatgccccgggtcccgggtggtggttagcggcgtggtgcaccagatgcggcggccgctgttgctgctgctgctgctgctgttgctgctgttgctgctgctgttgctgttgctgctgctgatgctgctgctgcagggcgcctggcccgtgcagctcgtctccgcggccgccctgctgcaccaccaccgagggcttgatgtccggctggcccagggggctggtggaccacggggagccgtcgccgccgcccccgccgccgcccccgccccccccgccgccgccaccgcccccgccgccgccgccgtgggacagcgcggtgatccactggtgagcgtggctgagcgggtgtccgttgctctgcagagcgccgtagtcgccctgcaccaggctctgcgcttcgcggtagccccccgcgccctgctgcatgccgccgggcggctcggcgtgcacgatggaggcgctggaggtgagcaggctgtagtggttagacgctgcggtcgccatgactctcggagccggactgagcgctccggttaaaggagccgcgcatttgacagttactttttcgcctcgggctccctctcctcgctcgctctttctgtctcctctctctcccacagcgggcagctccgacgcccgctccgacgccttctgttgctgctcctgctattactgctgctgctgccgccgccgccgcctcccgcccgccctcgctctctttctcctcctctccctccttctcgctctcgctcactctctgactagctcggcgctcccccctctccctgctctctccagctctctcccgctctcttggcagcgccggctcgcagcggcacgcgcctgggccccgccccctccgccccctcccattggctccgcgccctttgatttacgtggataccgctagcaacctcccaggccggcgccactgattggcgcagagctactccctccccctcccccgggctcggagtcctcctagccctcctccccgtccccttcgcctcccgattcagattctctcagttctcacccccccgcttcttcctcacccggggcctcctccgccctctctcggatgggccccgccccccatctgtctcccaggcagagaagaccggcaggggggcggtcccggtgctcttatcggccacagacacttggaagacttggattggggtggggggcgggaggcagtggtgtccactttcgtttcccaatagggctttaagatggggaaacggagggggtaagggaaaagctgggtcgcaccgagccagcgggagtcggatttttattcacctagggacacacacacagtgtgtatctcttaaacctagagccaagagccagacctgttcccctgttcaactctccttgcatcccacggttagaatttcagtgcacaagtgtctcttgctccagggtgtgcggacacttcggcccaaagctcttctccttcccctctaccccgcggctagcacaggctctcttccttttaggttccaggcccaattgtctcccactcccttggggaaagaaccccgagagaggcaggctcagcccgcaccgcggcttgtaagtcattcccatcaaggctcggagttgcttgctctgacagcgtagcggtctgaactgaaaaccaaacaaaactctaaaagtctctccgtcagattcacacgccggcgcgtgcagtttttggtttagaaaactagaagcctgcgtgggctccgtcttgtgcgaggctgccggagtgctggcgaggggtgtgcggccttgtaggggcggcgcagtcgccaaaggccgctccgggaagccgcgcggagggcctgcgtgcgcgattccccgtgctcctaccgctggtaggtgcaacttttccgttagccccttgggaaggaggaagagtgtgtgaagcaaatgggctgatgccaggggaaccttcctaatcagtaacttcggtgggcgctagcgggtggggttagtctatgtctttggcgctccctggccaagctcccagctcagctttcagcagtgaactccagagcaagactatgggaccatgcacccgcagcgccgctctacggagcgcgggcgcgtcgcgccatcagttctttagccgcccagagcaggtgccgcctgcgagtttccgagcctgcaagcccggtagctagaacttgggcgcggacccaggctggagcggcgtgaccgccacgcagggccgggtgtgtacatgggcgctgtaaagcgaatcaacagttactgccgggaagggaatgacagaccccagggaacctggatcgcgtccccacctctcacccctcgctctatcgctggttttgccggcggtcgtaggcttgagagggcagccaaatcaacgctcagagggagcattttggggcctctgagcatctgaatccagacagcagactggagcgggccagaaaattcatcatgactaacaaggagtcatgctctttggagagtggctgagctgtttataaatcaccacgttgagcacccgcccgggcaagacgctttggctgagaatttccacgtgtcctgtgtttatgagcgtgtgtgggggagagaaatggataggggaggggcgagcccacaggccgccagcaggacggacctgcacccccaccacgcgcgcacccgcgcggcgaggcgaggcgaggacacacacagcgtgtcgctccgtcccagcgcaagcgcggggccactctggccgcgcgcctgggggctgctaggaatcccataactttgtctagctaggaaaaaatgaacaagtccgagcctcagcgcgcagactcagcgactggtgcccgcggctccgcaaccgcgagccaaggggctgggtggcgggcagaaccgccttctcccggcttcggccctgcgtcccctgtgctaggcgcgtgactttccctgggccttggggagcgcacagacagcccgccagccgcatcttctcctgacatgtcgtgcctttcttttcgcggacctggagctcagagctcccacggacagaagaatccagccctggggaagggccgcgtccaagtgctaagcagctcatacttctcccccacctttctggggcaggtgtctgcttttctctggatttaatttcacatttctcgaggcacaaggccttctgcagcccataggatgatacactcgaaagaagaatgaagttttcaaacacatcttcgaaggaactgaggcggcctggctctgaatcaatttaaaagttcctcctcctcttatctttctctccacaccccaccccacacccccgccctcctcccggcatagggcgctagtgtgaggggacaagaataggctgcacgtgtacatcaaaacttcctgtctgcgataggacatcaccggcgattaatgctgagatccttcccacgttgacttcccaggtctcaactccaacttccatccccgtctcatttcgctggcggccaaggagccgaaacgttcccaacagggtttaatatacccaataaatccccgggagtacacaaagaaatagcctacccggggcctcagtctctgcaccccacccccacccccaagcgcggccaatcaccgggcgggccaggctgggctcgcaccgcggctctgagcaacacctccccacgagctaccgccgcctcccctccaggcgccaggggcccggttggcgcgaacgccgggttccgagcaccctgggcttccttgtctgcctcccagcgcggcacctcttcggggctcccgaaacctgagctctcgctggttttaggtccagactggggcctctccaccggttcctcccccgccccgggctctggggcccattctttgggctgaccctgtcagggcagagtccgcgcgtctgcctgccattctccgcccgcataaaagcacgttgaaggtgtctcgggcagacacctccaggttttgaatcagtttattccctttcactgttcaaagcagctgttcaaatacacaggctgcttacgttgacgtggagaggatttcaaacaacgctaaaatgctttgaactgacaaggtgtcttgatatctccctcactccatccagcacagctcctcgagatc

SEQ ID NO: 322 - DNA, 2065 bp, Homo Sapiens
ggcttggcaatgaggccgaactcctggagagcatgggggatgcaccgccgccccaggacgagcacaccaccatcatagaccgcggaccgggggcctgcgaggagagcaaccatctcctgctcaatggtggctcccacaagcacgtgcagagccagattcacaggtcagccgactccggggggcggcagggcagagaacagaagcaggaccccctgcactcgcccacctccaagaggaagaaggtgaaatttaccacctttaccaccatccccccggacgacagctgccccacggtgaactccatcgtcagcagcaatgatgaggacatcaaatgggtgtgtcaagacgtggctgtgggtgcccccaaggaacttagaaactatctggagaaactcaaagataaggcttaggcccctctagccaaagggccctgcccagatgccttccttgtactggaaactggcccaagtggggcagaaggcgttgtcagtggggttaagaagggacggtcccagggtccatgctagaccagttggaaagttttgaagtcaggaaaagacgtttttgtatcaagggatttttagcagttaatggtggtggatttttaaaggtcaggggaataaagtctggggcatggggagtgcagaccaagttactgaactgcacaggcaaaattaggaaggttattttatgagtcaaaacatactacagacaagctaccaaaaattatttgttaaaaaatgcaacaagacaaataaaaagagaaataatcatctgtttatatttctaataaaggagcaaaatataaaaataggacctgctaagagacattttccattctaattcacgattcacttttccaaggacagccttcaactgtcaccacacagctgggggggagtcatttcttaacaagggatgcctcttgggatagaactagggagttttaaatctttacttgatcatcttttattttcttttccactttttccttttctctctctctctgtgtcctagacttccattgcatttatatttaatgtttatttctgagaatcaagcagtatatttttcctaaatgaaacataaattatattcctattcattagataggttcctaggaacaatgccaattaatccattgtttaagtagtaacttgaatgtttttctatatccctccagctttgttgatagtggcgggttttgtacaattggagggagccctcagagccttctgggggaggagaggaactgtccttaatccatcaccactaccatagggcaaagccagcaggtgtggccctgtgaggggctgtacagacgggatgtggccaggagaacagagccccacctggaccacctgacccctcgggattccacccctgtcatcgtggggatgttcctatataggagaaagttgggttaaatcaaaaaagaggccacgcccaggtgtaatcagagccaacctggtgggctgggtctatcacaagacataactgatgctgaacatgaacaaagataaaaactgtttggagggtttttgagttgtttttcttatgttgttgggtggggtataccagcataaactctaaagataaaatctatgttagattgtcaatcaactgtgtttttgaacagcataattgtgtagcagcacattgcaaaaatgcattcatccaaagcgacacatgtggcaacgtagaccacgccagtgaaataagccccttcgtgatcacctgactccagttctccgtgtgctccattggctgcggctgcaggaggaagatgcctgacagccctcatgctctccgcaggggggcgctcacaaagatgccaggggtgtttattgtgtttatttttttaattactaaaatcagtagctaagaaagggtccttgaagcctcctaacctgggttggacctttgaaaaatatatttgtagcacatattatagatggaaagaagaagatatttatttatacctgtgatgccaattgtcattaaaaggcttttcatggcttgacaagtcaaaaaaaaaaaaaaaaaaaaaaaaaaaaaaaaaaag

SEQ ID NO: 323 - DNA, 164 bp, Homo Sapiens
ggggaggcgcaacttacggctaggtagcgaggcctgggtggtgcggcgatgacttctgccggctgctgaaccggtgtggcgaggcggcgcggagcctgcccctgtggcgccaggtgtttcggggtgcgggtctcgccgaccggggagaaggtcacgcacactgg

SEQ ID NO: 324 - DNA, 420 bp, Homo Sapiens
  misc_feature (266)..(266): n is a, c, g, or t
  misc_feature (269)..(269): n is a, c, g, or t
  misc_feature (282)..(282): n is a, c, g, or t
  misc_feature (291)..(291): n is a, c, g, or t
  misc_feature (304)..(304): n is a, c, g, or t
  misc_feature (307)..(307): n is a, c, g, or t
  misc_feature (321)..(321): n is a, c, g, or t
  misc_feature (342)..(342): n is a, c, g, or t
  misc_feature (379)..(379): n is a, c, g, or t
  misc_feature (384)..(384): n is a, c, g, or t
  misc_feature (393)..(393): n is a, c, g, or t
agtgaaactgcgaatggctcccactctcagaaaaaaggggctgtgagccatgctgccttacctatggacagaccttcgcagacgggacggacctttgtcgctcggctctgggccacgcctaccggtggctgctcctggagccgtcactgcttcaacatctccatctccgcggtacctcgtcccagaccaggacgacggggccgggaagctccctcccggcgttcccgcagccctcgtacctccatcctggacgctgcgggcagggngangtggcagtggaancggcaggcnccctaggcggacngtnggccctgagttggnggagcgacccttcccccagcnccgcccctcaggacacccagaaccccacccctcgtcntcttnggccttctngtaatagttttgagatgtctgtccctc

SEQ ID NO: 325 - DNA, 493 bp, Homo Sapiens
tttcagaagaaagacatccaatctgttttttattttatttttttacacagggtcttgctctgtggtccaggctgaagtgcagtggcatgatcatcactcactacagccacaacctcctggtctcaagtgatcctcctgcctcactcagcctcccgagtagctgggactacaggcatgcaccaccacatccggctaatttagagaagtttttttttgtatagacagggtcgtagtatgttgtctaggctggtctcaaactcctgagctcaagtgatcctcccaccctggcctcccaaagacccaaagactacagacctgagccaccatgcccacctgttttcttgacaggacttgcatatgacaagctctctgcttctcctcacctatgcattgcaagccaggtcagaggcaggttaaacaccttaaggacatgttaggacaagtggcatacaagggaaaaaaacccgttcatttaagttacagaaacagaaaa

SEQ ID NO: 326 - DNA, 347 bp, Homo Sapiens
  misc_feature (292)..(292): n is a, c, g, or t
ggcacgagcggcacgagcattcactcacaccttgcatttcacccctgcatcccagtcgccctgcagcctcacacagatcctgcacacacccagacagctggcgctcacacattcaccgttggcctgcctctgttcaccctccatggccctgctactggccctcagcctgctggttctctggacttccccagccccaactctgagtggcaccaatgatgctgaagactgctgcctgtctgtgacccagaaacccatccctgggtaacatcgtgaggaacttccactaaccttntcatcaaggatggctgcagggtgcctgttgtagtgttcaccacactgaggggccg

SEQ ID NO: 327 - DNA, 5776 bp, Homo Sapiens
gctcacccaggaaaaatatgcaatcgtcccattgatatacaggccactacaatggatggagttaacctcagcaccgaggttgtctacaaaaaaggccaggattataggtttgcttgctacgaccggggcagagcctgccggagctaccgtgtacggttcctctgtgggaagcctgtgaggcccaaactcacagtcaccattgacaccaatgtgaacagcaccattctgaacttggaggataatgtacagtcatggaaacctggagataccctggtcattgccagtactgattactccatgtaccaggcagaagagttccaggtgcttccctgcagatcctgcgcccccaaccaggtcaaagtggcagggaaaccaatgtacctgcacatcggggaggagatagacggcgtggacatgcgggcggaggttgggcttctgagccggaacatcatagtgatgggggagatggaggacaaatgctacccctacagaaaccacatctgcaatttctttgacttcgatacctttgggggccacatcaagtttgctctgggatttaaggcagcacacttggagggcacggagctgaagcatatgggacagcagctggtgggtcagtacccgattcacttccacctggccggtgatgtagacgaaaggggaggttatgacccacccacatacatcagggacctctccatccatcatacattctctcgctgcgtcacagtccatggctccaatggcttgttgatcaaggacgttgtgggctataactctttgggccactgcttcttcacggaagatgggccggaggaacgcaacacttttgaccactgtcttggcctccttgtcaagtctggaaccctcctcccctcggaccgtgacagcaagatgtgcaagatgatcacagaggactcctacccagggtacatccccaagcccaggcaagactgcaatgctgtgtccaccttctggatggccaatcccaacaacaacctcatcaactgtgccgctgcaggatctgaggaaactggattttggtttatttttcaccacgtaccaacgggcccctccgtgggaatgtactccccaggttattcagagcacattccactgggaaaattctataacaaccgagcacattccaactaccgggctggcatgatcatagacaacggagtcaaaaccaccgaggcctctgccaaggacaagcggccgttcctctcaatcatctctgccagatacagccctcaccaggacgccgacccgctgaagccccgggagccggccatcatcagacacttcattgcctacaagaaccaggaccacggggcctggctgcgcggcggggatgtgtggctggacagctgccggtttgctgacaatggcattggcctgaccctggccagtggtggaaccttcccgtatgacgacggctccaagcaagagataaagaacagcttgtttgttggcgagagtggcaacgtggggacggaaatgatggacaataggatctggggccctggcggcttggaccatagcggaaggaccctccctataggccagaattttccaattagaggaattcagttatatgatggccccatcaacatccaaaactgcactttccgaaagtttgtggccctggagggccggcacaccagcgccctggccttccgcctgaataatgcctggcagagctgcccccataacaacgtgaccggcattgcctttgaggacgttccgattacttccagagtgttcttcggagagcctgggccctggttcaaccagctggacatggatggggataagacatctgtgttccatgacgtcgacggctccgtgtccgagtaccctggctcctacctcacgaagaatgacaactggctggtccggcacccagactgcatcaatgttcccgactggagaggggccatttgcagtgggtgctatgcacagatgtacattcaagcctacaagaccagtaacctgcgaatgaagatcatcaagaatgacttccccagccaccctctttacctggagggggcgctcaccaggagcacccattaccagcaataccaaccggttgtcaccctgcagaagggctacaccatccactgggaccagacggcccccgccgaactcgccatctggctcatcaacttcaacaagggcgactggatccgagtggggctctgctacccgcgaggcaccacattctccatcctctcggatgttcacaatcgcctgctgaagcaaacgtccaagacgggcgtcttcgtgaggaccttgcagatggacaaagtggagcagagctaccctggcaggagccactactactgggacgaggactcagggctgttgttcctgaagctgaaagctcagaacgagagagagaagtttgctttctgctccatgaaaggctgtgagaggataaagattaaagctctgattccaaagaacgcaggcgtcagtgactgcacagccacagcttaccccaagttcaccgagagggctgtcgtagacgtgccgatgcccaagaagctctttggttctcagctgaaaacaaaggaccatttcttggaggtgaagatggagagttccaagcagcacttcttccacctctggaacgacttcgcttacattgaagtggatgggaagaagtaccccagttcggaggatggcatccaggtggtggtgattgacgggaaccaagggcgcgtggtgagccacacgagcttcaggaactccattctgcaaggcataccatggcagcttttcaactatgtggcgaccatccctgacaattccatagtgcttatggcatcaaagggaagatacgtctccagaggcccatggaccagagtgctggaaaagcttggggcagacaggggtctcaagttgaaagagcaaatggcattcgttggcttcaaaggcagcttccggcccatctgggtgacactggacactgaggatcacaaagccaaaatcttccaagttgtgcccatccctgtggtgaagaagaagaagttgtgaggacagctgccgcccggtgccacctcgtggtagactatgacggtgactcttggcagcagaccagtgggggatggctgggtcccccagcccctgccagcagctgcctgggaaggccgtgtttcagccctgatgggccaagggaaggctatcagagaccctggtgctgccacctgcccctactcaagtgtctacctggagcccctggggcggtgctggccaatgctggaaacattcactttcctgcagcctcttgggtgcttctctcctatctgtgcctcttcagtgggggtttggggaccatatcaggagacctgggttgtgctgacagcaaagatccactctggcaggagccctgacccagctaggaggtagtctggagggctggtcattcacagatccccatggtcttcagcagacaagtgagggtggtaaatgtaggagaaagagccttggccttaaggaaatctttactcctgtaagcaagagccaacctcacaggattaggagctggggtagaactggctatccttggggaagaggcaagccctgcctctggccgtgtccacctttcaggagactttgagtggcaggtttggacttggactagatgactctcaaaggcccttttagttctgagattccagaaatctgctgcatttcacatggtacctggaacccaacagttcatggatatccactgatatccatgatgctgggtgccccagcgcacacgggatggagaggtgagaactaatgcctagcttgaggggtctgcagtccagtagggcaggcagtcaggtccatgtgcactgcaatgccaggtggagaaatcacagagaggtaaaatggaggccagtgccatttcagaggggaggctcaggaaggcttcttgcttacaggaatgaaggctgggggcattttgctggggggagatgaggcagcctctggaatggctcagggattcagccctccctgccgctgcctgctgaagctggtgactacggggtcgccctttgctcacgtctctctggcccactcatgatggagaagtgtggtcagaggggagcaatgggctttgctgcttatgagcacagaggaattcagtccccaggcagccctgcctctgactccaagagggtgaagtccacagaagtgagctcctgccttagggcctcatttgctcttcatccagggaactgagcacagggggcctccaggagaccctagatgtgctcgtactccctcggcctgggatttcagagctggaaatatagaaaatatctagcccaaagccttcattttaacagatggggaaagtgagcccccaagatgggaaagaaccacacagctaagggagggcctggggagccccaccctagcccttgctgccacaccacattgcctcaacaaccggccccagagtgcccaggcactcctgaggtagcttctggaaatggggacaagtcccctcgaaggaaaggaaatgactagagtagaatgacagctagcagatctcttccctcctgctcccagcgcacacaaacccgccctccccttggtgttggcggtccctgtggccttcactttgttcactacctgtcagcccagcctgggtgcacagtagctgcaactccccattggtgctacctggctctcctgtctctgcagctctacaggtgaggcccagcagagggagtagggctcgccatgtttctggtgagccaatttggctgatcttgggtgtctgaacagctattgggtccaccccagtccctttcagctgctgcttaatgccctgctctctccctggcccaccttatagagagcccaaagagctcctgtaagagggagaactctatctgtggtttataatcttgcacgaggcaccagagtctccctgggtcttgtgatgaactacatttatcccctttcctgccccaaccacaaactctttccttcaaagagggcctgcctggctccctccacccaactgcacccatgagactcggtccaagagtccattccccaggtgggagccaactgtcagggaggtctttcccaccaaacatctttcagctgctgggaggtgaccatagggctctgcttttaaagatatggctgcttcaaaggccagagtcacaggaaggacttcttccagggagattagtggtgatggagaggagagttaaaatgacctcatgtccttcttgtccacggttttgttgagttttcactcttctaatgcaagggtctcacactgtgaaccacttaggatgtgatcactttcaggtggccaggaatgttgaatgtctttggctcagttcatttaaaaaagatatctatttgaaagttctcagagttgtacatatgtttcacagtacaggatctgtacataaaagtttctttcctaaaccattcaccaagagccaatatctaggcattttcttggtagcacaaattttcttattgcttagaaaattgtcctccttgttatttctgtttgtaagacttaagtgagttaggtctttaaggaaagcaacgctcctctgaaatgcttgtcttttttctgttgccgaaatagctggtcctttttcgggagttagatgtatagagtgtttgtatgtaaacatttcttgtaggcatcaccatgaacaaagatatattttctatttatttattatatgtgcacttcaagaagtcactgtcagagaaataaagaattgtcttaaatgtc

SEQ ID NO: 328 - DNA, 424 bp, Homo Sapiens
  misc_feature (311)..(311): n is a, c, g, or t
gcacttcctctccaggaatccgcggagggagcgcaggctcgaagagctcctggacgcagaggccctgcccttgccagacggcgcagacatgtcagaacaaagtaaggatctgagcgaccctaactttgcagccgaggcccccaactccgaggtgcacagcagccctggggtttcggagggggttcctccgtccgcgaccctggcagagccgcagagccctcctctaggcccgacggccgctccgcaggccgcgccgcctccccaggccccgaacgacgagggcgacccgaaggccctgcagcaggctgtgngggaaggcgcgcccaccaggccccgagcgcggccagccgggcccggcaccgccagccccggcgcagctggtgcagaaggcgcacgagctcatgtggtacgtgctggtcaagga

SEQ ID NO: 329 - DNA, 2099 bp, Homo Sapiens
tttttttttttttttttttagtcacatatttacataagatatcatagtcatggtagactaatgagaggagaagcattttggttatgtcatttcgggataattttatcagttgtgagagtttaacaataaagaacataaaacttgctgtttcataaaaatatgaaattttcctggagaaattttgacttaataaaggaacaaagaactcagtttgtagtgaataaaattttacattcacttccccactttctcatagaagatctacagttggggataaccgataagaggcaattggtttctggcttaagagcctttctcattaggaattttcggtaaattaaagtctgaaattagaaaaacattagacattaatcaacagaccaacaccagtcacgtaaataaatggcattcgtataatttggcagctgaaattcttaaataatctggcaggtacaaggagagaaagaggaaaaatgaaccgttcatcattctcactgcggtctcaccgtttctctccccacctcctttttaaaaattccttttttgcctctgtttccaaagaaatgccagctcaaaaccaaggcagttggaatttaacagctctaggaagctctagtgagaataaaagccaaataatatgaaccagccaaaattccttttgcaacatttttccccaaaagaaaaatacagaagatatttcttttcaagtctctaattctacctttaaaaaatatgtgtactaatgaacagtattcattttaaatctagaacctgggaatatattactataggcaagacacctttaggtaaagagctcataattttccattgaatacagtaaaattataaagaatgtaacaaaggctttggtaatttggtagaggggctttttgatgaaaaaaagacagatgatttagaaagcgaggaacacatcaagcctcagggaaagaaaatgtttgattggtattaattaaaacactgctaatatattctaataaaatcaaatttaacattctaaagtaatcctcttggtatgtcaaaggaaaagaaaggtattatcttatttgcatctctgcaatccaaatgcatttgctcattcagcagaattaatttttatcaccagcctgttttatctcctcacagatttagtcaaagttattctttcaaactagaaaggatcagggtggggaatccatggaaggtattggaagactagtgactgtatttagtaccggctttatattttacgatgttctttctcttcattcgctgtaatggggtgtggagggaaacggtgagaccgcagtgagaatgatgaacggttcatttttcctctttctctccttgtacttgccagattatttaagaatttcagctgccaaattatacgaatgccatttatttacgtgactggtgttggtctgttgattaatgtctaatgtttttctaatttcagactttaatttaccgaaaattcctaatgaaaaaggctcttaagccagaaaccaattgcctcttatcggttatccccaactgtagatcttctatgagaaagtggggaagtgaatgtaaaattttattcactacaaactgagttctttgttcctttattaagtcaaaatttctccaggaaaatttcatatttttatgaaacagcaagttttatgttctttattgttaaactctcacaactgataaaattatcccgaaatgacataaccaaaatgcttctcctctcattagtctaccatgactatgatatcttatgtaaatatgtgactaacaaaaaaaaaatgaatgggccataaatactgaggaccatatttgcgtgtttccaaagtgaggggttctgcgtcctatcaaggagatgtaaactactgactacactaccgatgatgctggctttttgctccattgccttttcaagtcttcaacgtaaaagagcaatcgcagttcggtttcacatgtattgttctataatccaggcaataaatgctaattagtaatgctcaaggatccgaccattcagagtaattatcataatttacttcttccttgttaaagacattccttgctgattaaaaaaaaaaaaaaaaaaa

SEQ ID NO: 330 - DNA, 460 bp, Homo Sapiens
  misc_feature (66)..(66): n is a, c, g, or t
aaatatagaagctgactcaaaattgtaagtaacttatataaggttgcattatatataagagcagantagtattcaactcatatgtctgactctaaagccaatattatttccattatgcaattataaaatgaaaagaaaaatcagtattatcccatgtcattgacatgtaataaatggcacatatttatgtacatgcatatacccatgaaaccgtctctccaattaagacaatgtatatattcattaccccaaaatgttttcttgtgctactttgtaatccctccctcttcctcctccctgtccatcccaccctcgtccccagaaaattcctaatctgtttttctatagacatttacatttttacactatagactgtttacattttttagaattttatataaatggaatcttactgtctgtactcatttcttggtcttgcacttttgctcgacataataat

SEQ ID NO: 331 - DNA, 472 bp, Homo Sapiens
  misc_feature (70)..(70): n is a, c, g, or t
ggttcgagaagatgcttggccgtgaggttgaacgccaggtgaggtatcaggtcgcccgcaagacgctcgntcagttgctggacgaagccgagggcgtagcgcagcgcgtgcgggacacgttgcgcgccttggatgacatgctcaatacgcatgaggccgaggtagaccggctcagagcctacattcaagccgggcgcgagttcctggacgagaaccccgaggccggcgcggccaaggccggcgtgatcgagttcgacaagccgcgcgaacgcttcgcgcgcaagctcgccaacctggcaaccctcatggcgtcccatgaaatgagcgtcactcagatgaagctcacgcgggcgcaggccgtggacatgctggaccgcttctctgaaacggcatccgtcctggtgcccgtctggcgtcagcacaccctcgcgctcatcaccaccaagaacatgaatccggcaatggtcgccga

SEQ ID NO: 332 - DNA, 428 bp, Homo Sapiens
gatcccccaaactatctcaagcatctaaaaaattgccatttttaaaggcttaaattgtagtagtaaaggggaaaacaggaagtagtagtaaaggggaaaaaaaaccaataaagcatctaaaaaattggcatgttaaaaggcttaaattgctaatgtgtgtatatatatatatatatacacacacatatacacacacatatcattgacttttcttaagacttcagagtactgggtagatgaacactttatacagtatatatcttcagcttaaatttgttttgagtattttttttatttttaaataagtaggcaaagatttaaatttttttatttttagtaaatgtttgaggcacactaagacaacttgggcaatatttgccaaaacaaaacagaaccccaaaaaatgtacatcttggttcttagcaaat

SEQ ID NO: 333 - DNA, 626 bp, Homo Sapiens
ggacctgggaaggagcataggacagggcaaggcgggataaggaggggcaccacagcccttaaggcacgagggaacctcactgcgcatgctcctttggtgcccacctcagtgcgcatgttcactgggcgtcttcccatcggccccttcgccagtgtggggaacgcggcggagctgtgagccggcgactcgggtccctgaggtctggattctttctccgctactgagacacggcggacacacacaaacacagaaccacacagccagtcccaggagcccagtaatggagagccccaaaaagaagaaccagcagctgaaagtcgggatcctacacctgggcagcagacagaagaagatcaggatacagctgagatcccagtgcgcgacatggaaggtgatctgcaagagctgcatcagtcaaacaccggggataaatctggatttgggttccggcgtcaaggtgaagataatacctaaagaggaacactgtaaaatgccagaagcaggtgaagagcaaccacaagtttaaatgaagacaagctgaaacaacgcaagctggttttatattagatatttgacttaaactatctcaataaagttttgcagctttcaccaaaaaaaaaaaaaaa

SEQ ID NO: 334 - DNA, 281 bp, Homo Sapiens
  misc_feature (32)..(32): n is a, c, g, or t
  misc_feature (61)..(61): n is a, c, g, or t
  misc_feature (222)..(222): n is a, c, g, or t
  misc_feature (259)..(259): n is a, c, g, or t
tctctgagactcattcagcatgggtccttgangccagagggccagcaggctcctggctgtncccagcaggcccagcatgcaggtggtgggacactgggcagcaaggctgctgccgggaatcacttctccaatcagtgtttggtgtattatcattttgtgaatttgggtaggggggagggtagggataatttatttttaaataaggttggagatgtcaagttnggttcacttgccatgcaggaagaggcccactagaggncccatcaggcagtgttacctgt

SEQ ID NO: 335 - DNA, 452 bp, Homo Sapiens
tttttttttttcacgtggtgcattttgcttgtttattatgttttctctccatcagaatgaaagctcctcgagggcagggactttggtctattgtctgtatttgccggtgcctaggattgtgcctgtatgcaacaggcactcaataaatatttttgctgtagactggacaggcatgagttagattctctggggcttctgcagagactggtttgggaaagtgggtgctagggaaaagctctgctccctgcaacctccccattttaaactttcagtattgacaagtggagaggaaccggattcagtttgctggggacagaggcagtggggtgtggaagtgctcagagcagcctttgggaaagtgttggggaagccggattcccaactgtcagcctccaggctggggatggacctagatgctgagaagggcatacactgctgagggagtcaccgca

SEQ ID NO: 336 - DNA, 314 bp, Homo Sapiens
  misc_feature (198)..(198): n is a, c, g, or t
  misc_feature (296)..(296): n is a, c, g, or t
acacaggacacagcagctttctttggaaatctcccaggtgaggattcacatcccaaaataaaattcagaagccaggtggcctgtgctccccatgggtgacctctggaggcagtggaccaagatgcagcaaggagaggatgcagaacagcttcttgcagaagcacctgctccggcatccagcgctgcctgggaggcagnaaggagaggcagggcaggacacgctggtctgagatgagggggagccccacggcccccagggcaggcttagaggaggcacaggccctgccacggccaantcaggttcagccagcctt

SEQ ID NO: 337 - DNA, 199 bp, Homo Sapiens
tttttttttttttttttaatgtttcatgaaatctttaatgaaattggggagaggggcacaaacagaagggaggggcactggggacaggcttgggggcaagggaggtggacacggggcagggcagggcagggggctctcctcttccctgcagcaaccctcccccagtcatcccactgacgggggagggaggtggggaggt

SEQ ID NO: 338 - DNA, 819 bp, Homo Sapiens
atgggaaacaccaccagcgaccgggtgtccggggagcgccacggcgccaaggctgcacgctccgagggcgcaggcggccatgccccggggaaggagcacaagatcatggtggggagtacggacgaccccagcgtgttcagcctccctgactccaagctccctggggacaaagagtttgtatcatggcagcaggatttggaggactccgtaaagcccacacagcaggcccggcccactgttatccgctggtctgaaggaggcaaggaggtcttcatctctgggtctttcaacaattggagcaccaagattccactgattaagagccataatgactttgttgccatcctggacctccctgagggagagcaccaatacaagttctttgtggatggacagtgggttcatgatccatcagagcctgtggttaccagtcagcttggcacaattaacaatttgatccatgtcaagaaatctgattttgaggtgttcgatgctttaaagttagattctatggaaagttctgagacatcttgtagagacctttccagctcacccccagggccttatggtcaagaaatgtatgcgtttcgatctgaggaaagattcaaatccccacccatccttcctcctcatctacttcaagttattcttaacaaagacactaatatttcttgtgacccagccttactccctgagcccaaccatgttatgctgaaccatctctatgcattgtccattaaggacagtgtgatggtccttagcgcaacccatcgctacaagaagaagtatgttactactctgctatacaagcccatttga

SEQ ID NO: 339 - DNA, 711 bp, Homo Sapiens
  misc_feature (612)..(612): n is a, c, g, or t
  misc_feature (642)..(642): n is a, c, g, or t
ttttttttttttcaaagtggcagctgctcatttatttagccaaaaatagatactttctcgtacaatttggttcacacatatgtacatttctttgtatatatacacacacacaaaggcagacacgtttattctcactgaaactccaccccccaaaatcaaccggacaaacaaacctcacagcgaatgcggggtgccacaaaagcgacttggggagggctgaggaggactggttttatttctttttcttactttctttgtttagttttgcttttaggtatttatacacggacatgcttacaaggtggaactatacagagcgattttttttatacaattattacaacgattaaaaaaagttttttttgtttttttgttttttttaaagaactaggatgaggagagagccgataagaccagggcggcgtccaaatggttctggggccgcctgggcacgggatggaaagctgtcttgagtaactttttctccacttccaaggcactacagcgatctgttccgccttcgggctccgctggccgagcgaaggcggcggcggcagccgggtggcccgcggcttcgggaagtcccagcaggtgcggaggggcagagcccancagggaagagcggggtgcgggcgggggcgnggcgtgggccctgaaaacggcggtttgtcccaagccgggaaacttgcccagcggcgcttgagacagtct

SEQ ID NO: 340 - DNA, 5261 bp, Homo Sapiens
ctcaggcacgtctagattttcccacttacataggtcttgttaagaaaccagtcctgccttcttgccactcgtgtctttcgatggctcccttcccgaagtcccgctgcctctaagcggagtgttaagcggggctctcggaagccggtggaccgagatttccccgggtggggcgggcgcggtgtagcggcccgcgggctgacttgctcccggctgtcccccggccccagcgaccatgccccgtaaaggcacccagccctccactgcccggcgcagagaggaagggccgccgccgccgtcccctgacggcgccagcagcgacgcggagcctgagccgccgtccggccgcacggagagcccagccaccgccgcagagactgcaagtgaggaacttgataatagaagtttagaagagattttgaacagcattcctcctcccccgcctccagcaatgaccaatgaagctggagctcctcggcttatgataactcatattgtaaaccagaacttcaaatcctatgctggggagaaaattctgggacctttccataagcgcttttcctgtattatcgggccaaatggcagtggcaaatccaatgttattgattctatgctttttgtgtttggctatcgagcacaaaaaataagatctaaaaaactctcagtattaatacataattctgatgaacacaaggacattcagagttgtacagtagaagttcattttcaaaagataattgataaggaaggggatgattatgaagtcattcctaacagtaatttctatgtatccagaacggcctgcagagataatacttctgtctatcacataagtggaaagaaaaagacatttaaggatgttggaaatcttcttcgaagccatggaattgacttggaccataatagatttttaattttacagggtgaagttgaacaaattgctatgatgaaaccaaaaggccagactgaacacgatgagggtatgcttgaatatttagaagatataattggttgtggacggctaaatgaacctattaaagtcttgtgtcggagagttgaaatattaaatgaacacagaggagataagttaaacagggtaaagatggtggaaaaggaaaaggatgccttagaaggagagaaaaacatagctatcgaatttcttaccttggaaaatgaaatatttagaaaaaagaatcatgtttgtcaatattatatttatgagttgcagaaacgaattgctgaaatggaaactcaaaaggaaaaaattcatgaagataccaaagaaattaatgagaagagcaatatactatcaaatgaaatgaaagctaagaataaagatgtaaaagatacagaaaagaaactgaataaaattacaaaatttattgaggagaataaagaaaaatttacacagctagatttggaagatgttcaagttagagaaaagttaaaacatgccacgagtaaagccaaaaaactggagaaacaacttcaaaaagataaagaaaaggttgaagaatttaaaagtatacctgccaagagtaacaatatcattaatgaaacaacaaccagaaacaatgccctcgagaaggaaaaagagaaagaagaaaaaaaattaaaggaagttatggatagccttaaacaggaaacacaagggcttcagaaagaaaaagaaagtcgagagaaagaacttatgggtttcagcaaatcggtaaatgaagcacgttcaaagatggatgtagcccagtcagaacttgatatctatctcagtcgtcataatactgcagtgtctcaattaactaaggctaaggaagctctaattgcagcttctgagactctcaaagaaaggaaagctgcaatcagagatatagaaggaaaactccctcaaactgaacaagaattaaaggagaaagaaaaagaacttcaaaaacttacacaagaagaaacaaactttaaaagtttggttcatgatctctttcaaaaagttgaagaagcaaagagctcattagcaatgaatcgaagtagggggaaagtccttgatgcaataattcaagaaaaaaaatctggcaggattccaggaatatatggaagattgggggacttaggagccattgatgaaaaatacgacgtggctatatcatcctgttgtcatgcactggactacattgttgttgattctattgatatagcccaagaatgtgtaaacttccttaaaagacaaaatattggagttgcaacctttataggtttagataagatggctgtatgggcgaaaaagatgaccgaaattcaaactcctgaaaatactcctcgtttatttgatttagtaaaagtaaaagatgagaaaattcgccaagctttttattttgctttacgagataccttagtagctgacaacttggatcaagccacaagagtagcatatcaaaaagatagaagatggagagtggtaactttacagggacaaatcatagaacagtcaggtacaatgactggtggtggaagcaaagtaatgaaaggaagaatgggttcctcacttgttattgaaatctctgaagaagaggtaaacaaaatggaatcacagttgcaaaacgactctaaaaaagcaatgcaaatccaagaacagaaagtacaacttgaagaaagagtagttaagttacggcatagtgaacgagaaatgaggaacacactagaaaaatttactgcaagcatccagcgtttaatagagcaagaagaatatttgaatgtccaagttaaggaacttgaagctaatgtacttgctacagcccctgacaaaaaaaagcagaaattgctagaagaaaacgttagtgctttcaaaacagaatatgatgctgtggctgagaaagctggtaaagtagaagctgaggttaaacgcttacacaataccatcgtagaaatcaataatcataaactcaaggcccaacaagacaaacttgataaaataaataagcaattagatgaatgtgcttctgctattactaaagcccaagtagcaatcaagactgctgacagaaaccttcaaaaggcacaagactctgtcttgcgtacagagaaagaaataaaagatactgagaaagaggtggatgacctaacagcagagctgaaaagtcttgaggacaaagcagcagaggtcgtaaagaatacaaatgctgcagaggaatccttaccagagatccagaaagaacatcgcaatctgcttcaagaattaaaagttattcaagaaaatgaacatgctcttcaaaaagatgcacttagtattaagttgaaacttgaacaaatagatggtcacattgctgaacataattctaaaataaaatattggcacaaagagatttcaaaaatatcactgcatcctatagaagataatcctattgaagagatttcggttctaagcccagaggatcttgaagcgatcaagaatccagattctataacaaatcaaattgcacttttggaagcccggtgtcatgaaatgaaaccaaacctcggtgccatcgcagagtataaaaagaaggaagaattgtatttgcaacgggtagcagaattggacaaaattacttatgaaagagacagttttagacaggcatatgaagatcttcggaaacaaaggcttaatgaatttatggcaggtttttatataataacaaataaattaaaggaaaattaccaaatgcttactttgggaggggacgccgaactcgagcttgtagacagcttggatcctttctctgaaggaatcatgttcagtgttcgaccacctaagaaaagttggaaaaagatcttcaacctttcgggaggagagaaaacacttagttcattggctttagtatttgctcttcaccactacaagcccactcccctttacttcatggatgagattgatgcagcccttgattttaaaaatgtgtccattgttgcattttatatatatgaacaaacaaaaaatgcacagttcataataatttctcttcgaaataatatgtttgagatttcggatagacttattggaatttacaagacatacaacataacaaaaagtgttgctgtaaatccaaaagaaattgcatctaagggactttgttgaactttatgctgaagattcttcaagttgattcagtgtattactgatttttttctatttgtaaaggattatgagttgtataaaatacatactccctaaactagatcatgaaactggtttctgttttatgcagttgtcatttgtaaagtctaataaaatattctctataattgcttctagattacaaaaatatgacaatcttgtaagtagcagactatggagaaaaatgagttacctggagggtcaggtaacttgccaaactaaaaagtatgttagttgaggcaaagtcctaagcaaggttgtgctatcaaggctcagcataccttcgtgggcctttgatttaccaacactggaaatgcctgccaactaatcttggatagattctttaaggcattccacttagcttgccagttgagacaatcaccacagttattacccaaatactatgaacatatttttgtaaaccagtcattctgaattatagtgatgagaatttaaatatatgcttttctagaatttgatgtttgaccatttatgacttaattaccagagagccagtaaattaggacagtgtttcaacaagcctaggctatctcgtaagttgaaaaatatcccactatagttgcttcatgagtatgaagtaagatggcctctgatttacactggttcaatttacaaattttcaactttatgataggtttatccgggtactaaatgcatttcaacttgatagtttcaacttatgataggtttaccaggatgtagtcccactgttgaggagcatctatttaggggttaattactttagtaataagtggaaagtaagataccttgagtaatgtttgcctataaaattgtcagcgtatttttacactattggctcaagaatgttataatgctaagggacataagttggcaaccacttggtttttggaaggactttcggtattgtattagaagtctgccctagctgttaaatttctgggtatttatcctaaggaattaattaaagagttaattgttcctttcttcagtgggccattgttttagatatttaaaaaatccaacagtttctatcataatgtaactgtaaaaatgtaaacacattattagcatggacttttaaataaagatttaaagaaagcaaaaaaaaaaaaaaaaaaaa

SEQ ID NO: 341 - DNA, 503 bp, Homo Sapiens
tggatctccggtaactgagacatagggtataactgttgtcgcggcggaggaagtgaggacggcgccaagggccttccgggccagtgttggatccctgtagtttgtgaagatggtgttgctaacaatgatcgcccgagtggcggacgggctcccgctggccgcctcgatgcaggaggacgaacagtctggccgggaccttcaacaatatcagagtcaggctaagcaactctttcgaaagttgaatgaacagtcccctaccagatgtaccttggaagcaggagccatgacttttcactacattattgagcagggggtgtgttatttggttttatgtgaagctgccttccctaagaagttggcttttgcctacctagaagatttgcactcagaatttgatgaacagcatggaaagaaggtgcccactgtgtcccgaccctattcctttattgaatttgatactttcattcagaaaaccaagaagctctacattgacagtcgtgctt

SEQ ID NO: 342 - DNA, 345 bp, Homo Sapiens
  misc_feature (36)..(36): n is a, c, g, or t
  misc_feature (282)..(282): n is a, c, g, or t
  misc_feature (304)..(304): n is a, c, g, or t
  misc_feature (311)..(311): n is a, c, g, or t
  misc_feature (340)..(340): n is a, c, g, or t
gaaagctgcactctgttgagctccagggcgcagtgnagggagggagtgaaggagctctctgtacccaaggaaagtgcagctgagactcagacaagattacaatgaaccaactcagcttcctgctgtttctcatagcgaccaccagaggatggagtacagatgaggctaatacttacttcaaggaatggacctgttcttcgtctccatctctgcccagaagctgcaaggaaatcaaagacgaatgtcctagtgcatttgatggcctgtattttctccgcactnagaatggtgttatctaccagancttcttntgacaatgacccccttgggggggcggccntgagc

SEQ ID NO: 343 - DNA, 160 bp, Homo Sapiens
  misc_feature (82)..(82): n is a, c, g, or t
  misc_feature (121)..(121): n is a, c, g, or t
  misc_feature (142)..(142): n is a, c, g, or t
ctgcaaaggcaggcaaggccagggcgggtgctgcctgggacccagtgactcagcacccctgcccggatcaactggacttttnccccctgcttccgccagcctcctgcttgggatctctccngggtctccctgctgcgcctgntccaggatgcagggagct

SEQ ID NO: 344 - DNA, 3399 bp, Homo Sapiens
cggcgacggcgtcctcaggagctgtggggtcccctgctagaagtgggggactcggcgggggagtcatttaatacttcatgattagaacaaatatgtgaaagttcccaccaaccagtgagaatttcttccttcagacggttttggatcttactgcacagctttctgagaagttcttttggtgccatgttttgtggcttgcatcaaaagaggagtttgtcttcatgaagattcctaacattggtaatgtgatgaataaatttgagatccttggggttgtaggtgaaggagcctatggagttgtacttaaatgcagacacaaggaaacacatgaaattgtggcgatcaagaaattcaaggacagtgaagaaaatgaagaagtcaaagaaacgactttacgagagcttaaaatgcttcggactctcaagcaggaaaacattgtggagttgaaggaagcatttcgtcggaggggaaagttgtacttggtgtttgagtatgttgaaaaaaatatgctcgaattgctggaagaaatgccaaatggagttccacctgagaaagtaaaaagctacatctatcagctaatcaaggctattcactggtgccataagaatgatattgtccatcgagatataaaaccagaaaatctcttaatcagccacaatgatgtcctaaaactgtgtgactttggttttgctcgtaatctgtcagaaggcaataatgctaattacacagagtacgttgccaccagatggtatcggtccccagaactcttacttggcgctccctatggaaagtccgtggacatgtggtcggtgggctgtattcttggggagcttagcgatggacagcctttatttcctggagaaagtgaaattgaccaactttttactattcagaaggtgctaggaccacttccatctgagcagatgaagcttttctacagtaatcctcgcttccatgggctccggtttccagctgttaaccatcctcagtccttggaaagaagataccttggaattttgaatagtgttctacttgacctaatgaagaatttactgaagttggacccagctgacagatacttgacagaacagtgtttgaatcaccctacatttcaaacccagagacttctggatcgttctccttcaaggtcagcaaaaagaaaaccttaccatgtggaaagcagcacattgtctaatagaaaccaagccggcaaaagtactgctttgcagtctcaccacagatctaacagcaaggacatccagaacctgagtgtaggcctgccccgggctgacgaaggtctccctgccaatgaaagcttcctaaatggaaaccttgctggagctagtcttagtccactgcacaccaaaacctaccaagcaagcagccagcctgggtctaccagcaaagatctcaccaacaacaacataccacaccttcttagcccaaaagaagccaagtcaaaaacagagtttgattttaatattgacccaaagccttcagaaggcccagggacaaagtacctcaagtcaaacagcagatctcagcagaaccgccactcattcatggaaagctctcaaagcaaagctgggacactgcagcccaatgaaaagcagagtcggcatagctatattgacacaattccccagtcctctaggagtccctcctacaggaccaaggccaaaagccatggggcactgagtgactccaagtctgtgagcaacctttctgaagccagggcccaaattgcggagcccagtaccagtaggtacttcccatctagctgcttagacttgaattctcccaccagcccaacccccaccagacacagtgacacgagaactttgctcagcccttctggaagaaataaccgaaatgagggaacgctggactcacgtcgaaccacaaccagacattctaagacgatggaggaattgaagctgccggagcacatggacagtagccattcccattcactgtctgcacctcacgaatctttttcttatggactgggctacaccagccccttttcttcccagcaacgtcctcataggcattctatgtatgtgacccgtgacaaagtgagagccaagggcttggatggaagcttgagcatagggcaagggatggcagctagagccaacagcctgcaactcttgtcaccccagcctggagaacagctccctccagagatgactgtggcaagatcttcggtcaaagagacctccagagaaggcacctcttccttccatacacgccagaagtctgagggtggagtgtatcatgacccacactctgatgatggcacagcccccaaagaaaatagacacctatacaatgatcctgtgccaaggagagttggtagcttttacagagtgccatctccacgtccagacaattctttccatgaaaataatgtgtcaactagagtttcttctctaccatcagagagcagttctggaaccaaccactcaaaaagacaaccagcattcgatccatggaaaagtcctgaaaatattagtcattcagagcaactcaaggaaaaagagaagcaaggatttttcaggtcaatgaaaaagaaaaagaagaaatctcaaacagtacccaattccgacagccctgatcttctgacgttgcagaaatccattcattctgctagcactccaagcagcagaccaaaggagtggcgccccgagaagatctcagatctgcagacccaaagccagccattaaaatcactgcgcaagttgttacatctctcttcggcctcaaatcacccggcttcctcagatccccgcttccagcccttaacagctcaacaaaccaaaaattccttctcagaaattcggattcaccccctgagccaggcctctggcgggagcagcaacatccggcaggaacccgcaccgaagggcaggccagccctccagctgccagacggtggatgtgatggcagaagacagagacaccattctggaccccaagatagacgcttcatgttaaggacgacagaacaacaaggagaatacttctgctgtggtgacccaaagaagcctcacactccgtgcgtcccaaaccgagcccttcatcgtccaatctccagtcctgctccctatccagtactccaggtccgaggcacttccatgtgcccgacactccaggtccgaggcactgatgctttcagctgcccaacccagcaatccgggttctctttcttcgtgagacacgttatgagggaagccctgattcacagggcccaggtaaaccaagctgcgctcctgacataccatgagaatgcggcactgacgggcaagtgacttctgcaagcctgcggctggtcccaatgccctgaatcacctctctcatggaagaaccaattaacaccaatgaatcaaccaaaac

SEQ ID NO: 345 - DNA, 563 bp, Homo Sapiens
tgagaagtctgcggctgagctgggagcaaatcccccaccccctacctgggggacaggcaagtgagacctggtgagggtggctcagcaggcagggaaggagaggtgtctgtgcgtcctgcacccacatctttctctgtcccctccttgccctgtctggaggctgctagactcctatcttctgaattctatagtgcctgggtctcagcgcagtgccgatggtggcccgtccttgtggttcctctctacctggggaaataaggtgcagcggccatggctacagcaagacccccctggatgtgggtgctctgtgctctgatcacagccttgcttctgggggtcacagagcatgttctcgccaacaatgatgtttcctgtgaccacccctctaacaccgtgccctctgggagcaaccaggacctgggagctggggccggggaagacgcccggtcggatgacagcagcagccgcatcatcaatggatccgactgcgatatgcacacccagccgtggcaggccgcgctgttgctaaggcccaaccagctctactgcggggcggtgttggt

SEQ ID NO: 346 - DNA, 634 bp, Homo Sapiens
tgcatcatgtctccccatcattgaagcgcaagttttcttgaattcaaatactcccaatgagcttgtatacttccaaacagctaaacttgatttccagttgtggatttcacacatataattgccgccttcttccctcctcttttttcccccctagttgaatcagcttgtctaacaagcccattttcatgccccagctgtgctgtgggttttccaagcctcatatttgaatattcaatgagtttaagatggatatgatttcaaaaaatagggccgggcgcggtggctcacgcctgtaatcccagcactttgggaggccgaagcaggcggatcacgaggtcaggaggtcgagatcatcctggctaacacagtgaaaccccatctctactaaaaatacaaaacattagccgggcgtggtggtgggtgcctgtagtcccagctactctggaggctgaggcaggagaatggcgtgaacccgggaggcggagcttgcaatgagccgaaatcgcgccactgcactcaacctgggtgacagaacgagacttcgtctcaaataaaaaataaaaatttattctttctgggggggggccccggccccaatctccccttaggggggcgtattaaattcactggccgg

SEQ ID NO: 347 - DNA, 5761 bp, Homo Sapiens
gtcagccttaaacactgactgcacccctcccagatttcttttacattaactaaaaagtcttatcacacaatctcataaaatttatgtaatttcatttaattttagccacaaatcatcttcaaaatgacgaggattttgacagctttcaaagtggtgaggacactgaagactggttttggctttaccaatgtgactgcacaccaaaaatggaaattttcaagacctggcatcaggctcctttctgtcaaggcacagacagcacacattgtcctggaagatggaactaagatgaaaggttactcctttggccatccatcctctgttgctggtgaagtggtttttaatactggcctgggagggtacccagaagctattactgaccctgcctacaaaggacagattctcacaatggccaaccctattattgggaatggtggagctcctgatactactgctctggatgaactgggacttagcaaatatttggagtctaatggaatcaaggtttcaggtttgctggtgctggattatagtaaagactacaaccactggctggctaccaagagtttagggcaatggctacaggaagaaaaggttcctgcaatttatggagtggacacaagaatgctgactaaaataattcgggataagggtaccatgcttgggaagattgaatttgaaggtcagcctgtggattttgtggatccaaataaacagaatttgattgctgaggtttcaaccaaggatgtcaaagtgtacggcaaaggaaaccccacaaaagtggtagctgtagactgtgggattaaaaacaatgtaatccgcctgctagtaaagcgaggagctgaagtgcacttagttccctggaaccatgatttcaccaagatggagtatgatgggattttgatcgcgggaggaccggggaacccagctcttgcagaaccactaattcagaatgtcagaaagattttggagagtgatcgcaaggagccattgtttggaatcagtacaggaaacttaataacaggattggctgctggtgccaaaacctacaagatgtccatggccaacagagggcagaatcagcctgttttgaatatcacaaacaaacaggctttcattactgctcagaatcatggctatgccttggacaacaccctccctgctggctggaaaccactttttgtgaatgtcaacgatcaaacaaatgaggggattatgcatgagagcaaacccttcttcgctgtgcagttccacccagaggtcaccccggggccaatagacactgagtacctgtttgattcctttttctcactgataaagaaaggaaaagctaccaccattacatcagtcttaccgaagccagcactagttgcatctcgggttgaggtttccaaagtccttattctaggatcaggaggtctgtccattggtcaggctggagaatttgattactcaggatctcaagctgtaaaagccatgaaggaagaaaatgtcaaaactgttctgatgaacccaaacattgcatcagtccagaccaatgaggtgggcttaaagcaagcggatactgtctactttcttcccatcacccctcagtttgtcacagaggtcatcaaggcagaacagccagatgggttaattctgggcatgggtggccagacagctctgaactgtggagtggaactattcaagagaggtgtgctcaaggaatatggtgtgaaagtcctgggaacttcagttgagtccattatggctacggaagacaggcagctgttttcagataaactaaatgagatcaatgaaaagattgctccaagttttgcagtggaatcgattgaggatgcactgaaggcagcagacaccattggctacccagtgatgatccgttccgcctatgcactgggtgggttaggctcaggcatctgtcccaacagagagactttgatggacctcagcacaaaggcctttgctatgaccaaccaaattctggtggagaagtcagtgacaggttggaaagaaatagaatatgaagtggttcgagatgctgatgacaattgtgtcactgtctgtaacatggaaaatgttgatgccatgggtgttcacacaggtgactcagttgttgtggctcctgcccagacactctccaatgccgagtttcagatgttgagacgtacttcaatcaatgttgttcgccacttgggcattgtgggtgaatgcaacattcagtttgcccttcatcctacctcaatggaatactgcatcattgaagtgaatgccagactgtcccgaagctctgctctggcctcaaaagccactggctacccattggcattcattgctgcaaagattgccctaggaatcccacttccagaaattaagaacgtcgtatccgggaagacatcagcctgttttgaacctagcctggattacatggtcaccaagattccccgctgggatcttgaccgttttcatggaacatctagccgaattggtagctctatgaaaagtgtaggagaggtcatggctattggtcgtacctttgaggagagtttccagaaagctttacggatgtgccacccatctatagaaggtttcactccccgtctcccaatgaacaaagaatggccatctaatttagatcttagaaaagagttgtctgaaccaagcagcacgcgtatctatgccattgccaaggccattgatgacaacatgtcccttgatgagattgagaagctcacatacattgacaagtggtttttgtataagatgcgtgatattttaaacatggaaaagacactgaaagggctcaacagtgagtccatgacagaagaaaccctgaaaagggcaaaggagattgggttctcagataagcagatttcaaaatgccttgggctcactgaggcccagacaagggagctgaggttaaagaaaaacatccacccttgggttaaacagattgatacactggctgcagaatacccatcagtaacaaactatctctatgttacctacaatggtcaggagcatgatgtcaattttgatgaccatggaatgatggtgctaggctgtggtccatatcacattggcagcagtgtggaatttgattggtgtgctgtctctagtatccgcacactgcgtcaacttggcaagaagacggtggtggtgaattgcaatcctgagactgtgagcacagactttgatgagtgtgacaaactgtactttgaagagttgtccttggagagaatcctagacatctaccatcaggaggcatgtggtggctgcatcatatcagttggaggccagattccaaacaacctggcagttcctctatacaagaatggtgtcaagatcatgggcacaagccccctgcagatcgacagggctgaggatcgctccatcttctcagctgtcttggatgagctgaaggtggctcaggcaccttggaaagctgttaatactttgaatgaagcactggaatttgcaaagtctgtggactacccctgcttgttgaggccttcctatgttttgagtgggtctgctatgaatgtggtattctctgaggatgagatgaaaaaattcctagaagaggcgactagagtttctcaggagcacccagtggtcctgacaaaatttgttgaaggggcccgagaagtagaaatggacgctgttggcaaagatggaagggttatctctcatgccatctctgaacatgttgaagatgcaggtgtccactcgggagatgccactctgatgctgcccacacaaaccatcagccaaggggccattgaaaaggtgaaggatgctacccggaagattgcaaaggcttttgccatctctggtccattcaacgtccaatttcttgtcaaaggaaatgatgtcttggtgattgagtgtaacttgagagcttctcgatccttcccctttgtttccaagactcttggggttgacttcattgatgtggccaccaaggtgatgattggagagaatgttgatgagaaacatcttccaacattggaccatcccataattcctgctgactatgttgcaattaaggctcccatgttttcctggccccggttgagggatgctgaccccattctgagatgtgagatggcttccactggagaggtggcttgctttggtgaaggtattcatacagccttcctaaaggcaatgctttccacaggatttaagataccccagaaaggcatcctgataggcatccagcaatcattccggccaagattccttggtgtggctgaacaattacacaatgaaggtttcaagctgtttgccacggaagccacatcagactggctcaacgccaacaatgtccctgccaccccagtggcatggccgtctcaagaaggacagaatcccagcctctcttccatcagaaaattgattagagatggcagcattgacctagtgattaaccttcccaacaacaacactaaatttgtccatgataattatgtgattcggaggacagctgttgatagtggaatccctctcctcactaattttcaggtgaccaaactttttgctgaagctgtgcagaaatctcgcaaggtggactccaagagtcttttccactacaggcagtacagtgctggaaaagcagcatagagatgcagacaccccagccccattattaaatcaacctgagccacatgttatctaaaggaactgattcacaactttctcagagatgaatattgataactaaacttcatttcagtttactttgttatgccttaatattctgtgtcttttgcaattaaattgtcagtcacttcttcaaaaccttacagtccttcctaagttactcttcatgagatttcatccatttactaatactgtatttttggtggactaggcttgcctatgtgcttatgtgtagctttttactttttatggtgctgattaatggtgatcaaggtaggaaaagttgctgttctattttctgaactctttctatactttaagatactctatttttaaaacactatctgcaaactcaggacactttaacagggcagaatactctaaaaacttgataaaatgaaatatagatttaatttatgaaccttccatcatgatgtttgtgtattgcttctttttggatcctcattctcacccatttggctaatccaggaatattgttatcccttcccattatattgaagttgagaaatgtgacagaggcatttagagtatggacttttcttttctttttctttttctttttttctttttgagatggagtcacactctccaggctggagtgcagtggcacaatctcggctcactgcaatttgcgtctcccaagttcaagcgattctcctgctttagactatggatttctttaaggaatactggtttgcagttttgttttctggactatatcagcagatggtagacagtgtttatgtagatgtgttgttgtttttatcattggattttaacttggcccgagtgaaataatcagatttttgtcattcacactctcccccagttttggaataacttggaagtaaggttcattcccttaagacgatggattctgttgaactatggggtcccacactgcactattaattccacccactgtaagggcaaggacaccattccttctacatataagaaaaaagtctctccccaagggcagcctttgttacttttaaatattttctgttattacaagtgctctaattgtgaacttttaaataaaatactattaagaggtaaaaaaaaaaaaaaa

SEQ ID NO: 348 - DNA, 299 bp, Homo Sapiens
  misc_feature (212)..(212): n is a, c, g, or t
  misc_feature (270)..(270): n is a, c, g, or t
  misc_feature (296)..(296): n is a, c, g, or t
aataattacccatatttatcttatttcaactaaaagtctcatcacaaacattcccactggcaccttcaccaaaatcactaacaaccataaaagtaaaaaccccttgagaattaaaatgaaccgaaaatctatttgcctcattccattaccccaacaataataggatttccaaatcggttggtagccatcattaatatttcccttcaaatccntattccccatccctcaaaaacggcctaaatcaaccaaccggtctcccattctttttcnaaccacttgacctagtttaaaacttnatt

SEQ ID NO: 349 - DNA, 249 bp, Homo Sapiens
  misc_feature (3)..(3): n is a, c, g, or t
  misc_feature (16)..(16): n is a, c, g, or t
  misc_feature (19)..(19): n is a, c, g, or t
  misc_feature (28)..(28): n is a, c, g, or t
  misc_feature (156)..(156): n is a, c, g, or t
  misc_feature (189)..(189): n is a, c, g, or t
ttntcctccattctgnttnaatcctcgncactgttggcctactgaatccagaggcaggggagggacggtgcaggcgcagagtattgggttttggctggcctcgatttaaagagacagaagctgtcggggtcctggaagacggtccccaataccctncccccaagtccttgggaccacttgggtccccanagctggggagatggtttgtggcggctttgcctgctccaagaatgcgctttgcgctctcaa

SEQ ID NO: 350 - DNA, 6706 bp, Homo Sapiens
gtctagattcttcttggcctctctgagcagcatttcttccttctgcgtatgggacaggaccctttctggaatgggggtcttatgacctacaatcaaacaagaacatggacttcccgtgcctctggctagggctgttgctgcctttggtagctgcgctggatttcaactaccaccgccaggaagggatggaagcgtttttgaagactgttgcccaaaactacagttctgtcactcacttacacagtattgggaaatctgtgaaaggtagaaacctgtgggttcttgttgtggggcggtttccaaaggaacacagaattgggattccagagttcaaatacgtggcaaatatgcatggagatgagactgttgggcgggagctgctgctccatctgattgactatctcgtaaccagtgatggcaaagaccctgaaatcacaaatctgatcaatagtacccggatacacatcatgccttccatgaacccagatggatttgaagccgtcaaaaagcctgactgttattacagcatcggaagggaaaattataaccagtatgacttgaatcgaaatttccccgatgcttttgaatataataatgtctcaaggcagcctgaaactgtggcagtcatgaagtggctgaaaacagagacgtttgtcctctctgcaaacctccatggtggtgccctcgtggccagttacccatttgataatggtgttcaagcaactggggcattatactcccgaagcttaacgcctgatgatgatgtttttcaatatcttgcacatacctatgcttcaagaaatcccaacatgaagaaaggagacgagtgtaaaaacaaaatgaactttcctaatggtgttacaaatggatactcttggtatccactccaaggtggaatgcaagattacaactacatctgggcccagtgttttgaaattacgttggagctgtcatgctgtaaatatcctcgtgaggagaagcttccatccttttggaataataacaaagcctcattaattgaatatataaagcaggtgcacctaggtgtaaagggtcaagtttttgatcagaatggaaatccattacccaatgtaattgtggaagtccaagacagaaaacatatctgcccctatagaaccaacaaatatggagagtattatctccttctcttgcctgggtcttatataataaatgttacagtccctggacatgatccacacatcacaaaggtgattattccggagaaatcccagaacttcagtgctcttaaaaaggatattctacttccattccaagggcaattggattctatcccagtatcaaatccttcatgcccaatgattcctctatacagaaatttgccagaccactcagctgcaacaaagcctagtttgttcttatttttagtgagtcttttgcacatattcttcaaataaagtaaaatgtgaaactcaacccacatcaccacctggaatcagggattgctcactccaggttactgcaaccctaactcactctagtgggaccttgactggagaaactccacgatcttcctgaagaagagaaatggatgtttccaaattccacaataagcaatatgtggtgataatgaaaagaatgattcagtcttgacggtgaatggaagacacttacctaacaagtactgctcatttacactcaaattaatcttgaagtagtcttaaaatgtgtaagaagttaaaacttgagaagcaaaaaaatgcctgcaaaaagaagatcattttgtatacagagaaccggatgaatataagcaatgaagatgaacatttattgatcttctacatacaagacttcaccataaggccaggagcagtggctcacaccttgtaatcccagcactttgggaggccaaggtgggcggatcaccttgaggtcaggagttcaaaaccagcctgaccaacatggtgaaaccctgtctctactaaatattagcggggtgtggtggcgggcacctgtaatcgcagcctttcaggaggctgagacaggagaatcgcttgaaccctagaggcggagtttgcagtgagccgagatagtgccattgtactccagcttgggcaacagagtaagactctgtctcaaaaaaaaaaaaacaaaaacaaacaaacaaaaaaaacacctcaccatgagtgctacatgtgaatagatattaagtgccatatataattagttctcagaagaagggagaaatgatcataggactgggaattgttttgcaaacgttctaggagatgtgagagaaaatatgtaaccacatcttagtggcccaagaaaatacaggcctgaagggataagattgtgtctctatagagcttcaaagcatacaggtcaattaagaaagcccctctctctccagagccgtttccctagcttttggcacctggatgccacagtcctccattaggctgatgactccaaagatgtaactctagcctcttgcctgagcttcagactcgcgtcccactgcccacaggacacatccacctggatgtgactcacaggtacctccaacccatcatgtggagatactcatcctgttccccctagagctgctcttcctgctgcattctctctctcaattactgggaccaccaagctaggaacctgggagtcatccttgatactttctcttcctccttaatcctgtgtattcagcaagtaactaaaggttggtgttggccaggcatggtggctcatgcctgtaatcccagcattttgggaggccaaggcgggcggatcacttgaggtcaggagctcaagaccagcctggccaacatggtgaaaccccatctctactaaaaaaaaaaaaaaaattagtcgggcgtggtggtgcatgcctgtaatcccagctactggggaggctgaggcaggagaatcgcttgaacctgggaggcagaggttgcagtgagccgggattgcgccattgtactccagcctgggtgaagaagtgagactctgtcttaaaaaaaaaaattggtgctgataaatattgatgaattctgctctctgctctctatggttgtcaacactgcagagttgaggcctcatatctcacctgcactgctgcaacagcttactggtcccttgctcccagccttctcctcttcagtccatcgtccacacagcactggggaaggggagccacttgaaacaaaagtcaacaactggttgtagttcataaacacagagctgtttgtgtcccctgtatctggaatgccattatgacccactacattttttctttcctacccctcttaaaactcagttcaggtagcagctccactaggaagccttggctgaccataatcccattcaattccatttcacctcttcgcaggcagtctggggttagggaccctttctctttgctccccaaaataaactggttatctctactattggatttacaacattgtattataatcttctccatgtgtgccttctctagtagaatgtgagctctttgaggccaaggtctatttaatttgtttgaaaaattcattgttatatcctcaaagcctagcacatagtaggtactgaatgaatgaatgaacaaggggtgccaggagactgctactcccagtccttcccagaaactgcctagggctttgagtcattttatgaagctaggtcttaatgcgtaggcaacctcccagctcactatgaacgctgacagaagagtgttttcatgtctataatcaagaattccagatacattccttttactgaaccttgaattgatcctaagattggtagtaaaggtattatgttacctcctaacagcactacaaagtacctttttttatcagaaaaaaattttaccattaggactcaatttgaagtactaatgcttctcaagttctccactatgagagttaccctgtattagaccgttacctataagaattaaggggtaaagcactaaacagaaaagaaaaaaaaaatagcaactctggtgagcagatttctttcctttcttccttccttctcctcttcctaccttcctccctcctttccctctcctccccttctctccctttccctccccttcccttccttttcttctttcctccgctcccctccccttccctccccttcccatccttctttctcttttttttacttaatccccagtgtgacagtaatataggctgatttctagaagtgtggtgtattactcatggaaagtgagttgccttggttattactttcaattgaaagttctatgggatctagaaatgagacatactggcatggagagtgagaacgacaaaggaatgaagagctacaggagcatttaggccatttctatgccaagcttattctacatgcacaaaatcatacatgttaataaatataaacaaattggaggcttatttaaaccaattatgaaatctggtaatttgtgcagcagcaatagatgataaccaaaaaaaactcataataatctgaatatcttgatcatttgtatttaaagaagcagtaattatatacttgaaagtacataatatagtattgcaaaaatgactttggtatattacaaattaaaagtatataagatgaaacttgatttgctatcaagccccaagcaatttttcaactgggcattgaattctaacttttctaagatagcaatttttgaagagacacgaacaaaaatctgaattagttcatgagccttaatgtaaatctcttgctgaaatagtttttaaaatcagaatttagttatctatcagactcaaaatcatttaaagactaacaaaacacaatcatgatattctaactgtggtcaaaccaggtacccaagccacctccctgcccaacgcctttccggcttttcccctccctcttgggctggtggttatgctcctccagctctagttcagctataattccttttatagagaaaccaacctgatacacactttcatgatgggagaaaaatgtgggagtgaaatgatatttagaaagcagcagtcaggcacggtggctcatgcctgtaatcccagcactttgggaggctgaggcaggcggatcacttgaggtcaggagctcgagaccagcctggccaacacggtgaaaccccatctctactaaaaaaaaatacaaaaattagccgggcgtggtggcaggcacctgtaatcccagctacttgggaggctgaggcaggagaaatcgcctgaacccagaaggcagaggttgcagtgagccaagatcacatcactgcactgcactccagccggggtgacagagcgaacctctgtctcaaaaaaaaaaaaagaaaaaagaaagaaagaaaaaaggcagaagccctggattcaaatccgccacacattcagtttctttatctgtaaaatggagaccaccccccgccacgctgaacggtgattctgtgactggtaagagatgctacatttttggtgcttgttcaggtggaggaaagatgatagttaacactcaggtaataagtattttgaaggcagtataatataccttcttaaagagtatacctactcaaatgttggtaaatgttgacatgattgaatctaaatggcaaagagtattttagaaaaacattaagtccctgcagataaatgacagtgttgatttggatgcttaattacattcagacatgaactgttggatgtatccgaaatgttaaaagctttttctcaacatttccaaaagtctttccaagaaatcaatgttatgttttgttccagaagcaaatttgcatttgtgatctgtttctaaaaatggtacaagttagctctgtttagaaagtaaaaatatctgatgttagattggaagtatctcttcctggggaatccagaaagataagcatagcatattgtcttactgcaatagataagttgcttattgagaagtctggttgttattctatatggtaacaatacagttgatgtatattttatgatagatcctttatattttcctcatgactttagaagggggaagggggagaaaattatgatgaccagactagttaaagagcattgaaagtccacagtactgtagctaaagtagaagtttgggtttgttatagactttacattatatcaactaataagcagatactgtacagtattgctcaccattttatcatacttttgcatatgaactactccattgccttttatagatgttttatagctgatcttaccagttttcctggtaactttttttatttcttttttttttttttgagacggagtctcgccctaacacccaggttggagtgcagtgccgtgatctcggctcactgcaacctctgcctcccgggttcaagcaattctcctgtctcagcctcccgagtacctgggactaccggtgcctgtctccacgcccggctaattttttgtatttgtagtagagacggggtttcaccgtgttagccaggatggtctcgatctcctgacctcatgatctgcctgcctctgcctggacctcccaaagtgctgggattacaggcgtgagcccccgcgcccagccactttctttaatactataactaagaatttattaaaatgcacaaattgtctaagactgtaaagtttattggggagaggccatgactacctctgaatttagtaaatttaaaatatttctgattctcaataaagaactaatatccatataaaaaaaaaaa

SEQ ID NO: 351 - DNA, 433 bp, Homo Sapiens
  misc_feature (379)..(379): n is a, c, g, or t
  misc_feature (382)..(382): n is a, c, g, or t
ttttttttttttttttttttttttttttttttttggggtataaaaaaaagtctgaaacattttacttcatattacacatactttttttttaaaaaaggcagaaacattgaaggaaacaaccctcaacatgaaagaaccttgggccggagttctaaaaggaccttgaaaatcagttttaaaaggccttgctgtcacatagtctttttcatgggtgcttgagtcatgctgaagagataggcttcatagattatatttaagaagttgtcatcattctgaatgaggtacagcagggcctcctggagctggagcttggtgagggggctgctggtgatcacggagggctccgggctctgtatgggcaggaggaggctggtggcancancaggtggctcctggcctcccacaggcaagaggccgctctccctttcctttg

SEQ ID NO: 352 - DNA, 1697 bp, Homo Sapiens
ggaggtgttagcagtgacagtgtgctgggtggcgcaaggcatcagctgaggctgcggggaagccccaggaaggggcagtggatggctggtgtggcttcttgggggagggtaggcaggtgggccccagctcttctcatccctgtcggcgcaggcatgtccaaccatgaggccttcctgagggtggacgccggctaccgcatgccctgccctctggagtgcccgcccagcgtgcacaagctgatgctgacatgctggtgcagggaccccgagcagagaccctgcttcaaggccctgcgggagaggctctccagcttcaccagctacgagaacccgacctgagctgctgtggagcgggcatggccgggccctgctgaggaggggcctgggcagagggcctggacctgggatcaaggcccacgcgcttccctggggtttactgaggtgatgggtgcaggaaaggttcacaaatgtggagtgtctgcgtccaatacacgcgtgtgctcctctccttactccatcgtgtgtgccttgggtctcagctgctgacacgcagcctgctctggagcctgcagatgagatccgggagactgacacgaagccagcagaggtcagaggggactctgaccacagcccgctctctggctgtctgtctgcagtgcccggctgagggtgggaggcaaacacgccttgttcctgctcttcccagttcagcttggtgggagaaagtcattcgcgtggctcgggacgctcatgtaaatttggttttggtgctcaagggttctttcctcccaggggcaggtgtttctttcctgtttgtcttgtgtcttgagagcttggccttatgaccagtgagaactctctccctggtctctgccagcccaagcatcactgcccgaggcgccagctcagtttcaccgtccacgtccacaaggggcttttcccaccttcacctttgtcgctgggtcagtgctggaaagcgcccctcactcctgcgctgacaagggcccttctctactgtctgtggggtggttccgggctgggggggctgcctcctttgcacctgattttgaaggtgtctctttcatccatggttaagtcataaaaagcttattggttttggttttgactcacctgaaagtttttttggtttaaaagaagaataggcggggcacggtggctcatgcctgtaatcccagcactttgggaggctgaggcaggtggatcacgaggtcaggagatcgacaccatcctggctaacacggtgaaaccccgtctctactaaaaaatacaaaaaattagctgggtgtggtggtgggggtgggcgcctgtgatcccagctacgtgggaggctgaggcagcagactggtgtgaacccgggaggtggagcttgcagtgagccgagatcgcgccactgcactccagcctgggcgacagagcgagactccatctcaaaaaaaaaaaaaaaaaaaagaaagaaagaaaaataattttgggagtttctggaaaggtactaggatttctcaaaaggatttgtcttctcccttgtgaaagacagatgtcagactaatcaggcttatccgatgtgctacatgagatggaaatgcgtgtgaaatagtaagtcacactaagtcttctggaggttctatttacgggtttggtttgatatgaatgttgcagaaactctataaaattctaga

SEQ ID NO: 353 - DNA, 577 bp, Homo Sapiens
cggcacgaggccttcgcgcagcgagcaccttcgacgcggtccggggacccctcgtcgctgtcctcccgacgcggacccgctgccccaggcctcgcgctgcccggccggctcctcgtgtcccactcccggcgcacgcctcccgcgagtcccgtgcccctcccgcgcccctcttctcggcgcgcgccgagcatggccgccccgcaggtcctcgcgttcgggcttctgcttgccgcggcgacgcggacttttgccgcagctcaggaagaatgtgtctgtgaaaactacaagctggccgtaaactgctttgtgaataataatcgtcaatgccagtgtacttcagttggtgcacaaaatactgtcatttgctcaaagctggctgccaaatgtttggtgatgaaggcagagatgaatggctcacaacttgggagaagacaaaacatgaagggggctccagaacaatgactggctttatgatcatgactgcgatgagagcgggtctttaaggcaacgagtgcacgcacctccacgtgctggtgtgtgacactgcctcgggcataagacgagacaggcgactgaa

SEQ ID NO: 354 - DNA, 464 bp, Homo Sapiens
  misc_feature (18)..(18): n is a, c, g, or t
  misc_feature (163)..(164): n is a, c, g, or t
gaaggagcagtggctcantgtgaggggcctgtaaatgggcgtgaggtgctgatgtccttgccttgctggaagatgtcaccatgtggggttcagctgaggttgtagccactcactcgttcccaggtcagaggtcagcagatgggtgtttctgggtgggccgtcnnttgggcctgtgcaacacagagcccgttcctcaggcgagtggtgctgaggtgctctgtggtgatgggaacggcagaggctggcaggtgactgaacttagcccagggaagctccacatcctgggaacactttcatgtaaccccttctagttttgaactctgcagcaggctggtgctgtgtagtggccacccagtcaccacccttggaagggtgtcagggtctgggctcgcatgcaccctgctcccttctgccagcctgcatcctctcctcaggcctccttcccacatcatctgtcttctcta

SEQ ID NO: 355 - DNA, 1554 bp, Homo Sapiens
aattatatatttttactctatgtttctctacatgtttttttctttccgttgctggcggaagaggcacgtgcgctgctgaatggagctggtcgctggttgctacgagcaggtcctctttgggttcgctgtacacccggagcccaaggcttgcggcgaccacgagcaatggactcttgtggctgacttcactcaccatgctcacactgcctccttgtcagcagtagctgtaaatagtcgttttgtggtcactgggagcaaagatgaaacaattcacatttatgacatgaaaaagaagattgagcatggggctctagtgcatcacagtggtacaataacttgcctgaaattctatggcaacaggcatttaatcagtggagcggaagatggactcatctgtatctgggatgcaaagaaatgggaatgcctgaagtcaattaaagctcacaaaggacaggtgaccttcctttctattcacccatctggcaagttggccctgtcggttggtacagataaaactttaagaacgtggaatcttgtagaaggaagatcagcattcataaaaaatataaaacaaaatgctcacatagtagaatggtccccaagaggagagcagtatgtagttatcatacagaataaaatagacatctatcagcttgacactgcatccattagtggcaccatcacaaatgaaaagagaatttcctctgttaaatttctttcagagtctgtccttgcagtggctggagatgaagaagttataaggttttttgactgtgattcactagtgtgcctctgcgaatttaaagctcatgaaaacagggtaaaggacatgttcagttttgaaattccagagcatcatgttattgtttcagcatcgagtgatggtttcatcaaaatgtggaagcttaagcaggataagaaagttcccccatctttactctgtgaaataaacactaatgccaggctgacgtgtcttggagtgtggctagacaaagtggcagacatgaaaagccttcctccagctgcagagccttctcctgtaagtaaagaacagtccaaaattggcaaaaaggagcctggtgacacagtgcacaaagaagaaaagcggtcaaaacctaacacaaagaaacgcggtttaacaggtgacagtaagaaagcaacaaaagaaagtggcctgatatcaaccaagaagaggaaaatggtagaaatgttggaaaagaagaggaaaaagaagaaaataaaaacaatgcagtgaatcacagatgtctcctgaaagaactcttttagatgaaatcattctactcaaatgtaccttaatttttttttttccctgagtaaaagcaagaaatttcttcctttggaaaaaatatatatattaaaaaaccacttttagatggttttttttaaaaaaaaaaaaaaaactggtaaaattacttttggcagacagtgttttatgaattatgtatcatgttgatatataatatgttaatgtgtcatgtaatttttactttgtacaaagcaaataaagatctttctcaaaaaaaaaaaaaaaaa

SEQ ID NO: 356 - DNA, 4955 bp, Homo Sapiens
tctcctcctaccggtcgggtgccccggggcgttccctctgccgctgcttctcggcgcggttcctacccggccgctccccgaggcgcgggctctggcggcctcgaccgactaggacgccccgtgcgccgcccgcgggccgccgcctccctgggcgcgcggggccagcatggagctcttccaagccaaggaccactacatcctgcagcagggcgagcgcgcgctgtggtgcagccgccgcgacggcggcctccagctccgacccgctactgatctacttcttgcctggaatcccatttgtttggggttggtagaaggtgttattgggaaaattcaacttcattcagatcttccatggtggcttattctaattcggcagaaagcattggtgggcaaactcccaggagaccatgaggtctgtaaagttaccaaaattgctgtgctctcactttctgaaatggaacctcaggatcttgagctagagctctgtaagaagcatcattttggtattaacaaaccagagaagatcataccatctcctgatgactcaaagtttctactgaagacctttacgcatattaaatccaatgtgtctgctcctaataaaaagaaagttaaggaaagtaaagagaaggagaagttggagaggagattacttgaagagttgctgaagatgttcatggactcagaatccttttattatagcttgacctatgacctgaccaattccgtgcagaggcagagcactggggagagggacggtcggcccctctggcagaaggttgatgaccgatttttttggaataaatacatgatacaagatcttactgagattggtactccagatgtggacttttggattatccccatgatccaaggttttgtgcagattgaagaacttgtggttaattataccgaatcatctgatgatgagaaaagcagcccagagaccccccctcaggagtccacctgtgtagatgatattcacccacgatttctagtggctctcatttcacgccgaagtaggcacagagcaggaatgcgctataaacgaagaggagtggataaaaatggaaatgttgccaattatgtggagactgagcagttgattcatgttcataatcataccctgtcatttgttcaaacacgaggctctgtgcctgtcttttggagccaggttgggtatcgatataacccaagaccgcggctggacagaagtgaaaaggaaactgttgcctatttctgtgcccatttcgaagaacaactgaacatttacaaaaaacaggttattattaacttggtagaccaggcaggaagagagaagattattggcgatgcttacctgaagcaagtgttgcttttcaacaactcacacctcacttacgtttcgtttgacttccatgagcactgccgaggaatgaagtttgagaatgttcagacactaacagatgccatttatgacattattcttgatatgaagtggtgttgggttgatgaagctggggtaatatgtaagcaggaagggatttttcgtgttaattgtatggactgcctggatcgcaccaacgtggtccaagctgccatcgcgagagtggtcatggaacagcagctgaaaaaattaggtgtgatgcccccggaacagccattacctgtgaaatgtaatcgcatctaccagataatgtgggccaataatggtgactccattagcagacagtatgctgggacagctgctctgaagggtgactttacaaggacaggagaaaggaagttagcaggagttatgaaagatggagtgaactcagcaaacagatattacctcaaccgatttaaggatgcttataggcaagctgttatagatttgatgcaaggcattccagtgacagaagatctttattccatatttaccaaggagaaagaacatgaagctttgcataaggaaaatcagagaagccaccaggaactaattagccagctcttacaaagttacatgaagttactactgcctgatgatgagaagttccatgggggctgggccctcattgactgtgaccctagcctcattgatgctactcacagagacgtggatgtgctgttactgctttctaactctgcctactacgtggcctattatgatgatgaagttgataaagtaaaccagtatcaacgactaagtctagaaaacctggaaaaaattgaaataggccctgaacccactctttttggtaagccaaagttctcctgcatgcgactgcactacagatacaaagaagcgagtggctatttccacacattgcgagctgtaatgcgtaatcctgaagaggatggaaaagatacccttcagtgcattgcagagatgctgcagatcaccaagcaagccatgggatcggatttacccataattgagaagaaacttgagaggaagagcagtaaacctcacgaagacatcattggtatcaggtctcaaaaccaaggttctttggcccagggaaagaattttttaatgagcaaattttcatctctaaatcaaaaagtgaagcagaccaaatccaatgtaaatattggcaacctccgaaagctaggaaactttaccaaacctgaaatgaaagttaactttctaaaaccaaacttaaaagtaaatctttggaaatcagatagtagtcttgaaactatggaaaacacaggagtgatggataaggttcaggcagagtctgatggggacatgtcttcagataatgactcataccactctgatgaattccttacaaattctaagtctgatgaagacaggcagctagctaactcattagagagtgtagggccaatagattacgttcttcctagttgtggtattattgcctcagcgcctcgattgggcagtcggtcccagtctcttagcagcacagatagtagcgttcatgctccttcagagattactgttgctcatgggagtgggcttggaaaaggccaggagtctcctttgaagaaaagtccttctgctggcgacgtacacatattgactggctttgccaagcctatggatatttactgccacagatttgtgcaagatgcacagaacaaagtgacccacctatcagagaccagatctgtgtctcagcaggctagtcaggaaagaaatcaaatgaccaatcaagtttcaaatgaaacccaatcagaatcaacagaacagacaccttctcggccatcgcaattagatgtctctctttctgcaacaggcccacagtttttgtcagttgagccagcgcattcagttgcatctcaaaaaacccccacctccgcttccagcatgcttgaacttgagacagggcttcatgtaactccttctccttcagagagcagtagcagcagagcagtctctccctttgccaagattcgaagttccatggtccaggttgctagtattacccaagctggattaacccatgggataaactttgcagtgtcaaaagttcagaagagtcctccagaacctgaaatcattaatcaagtccagcaaaatgaacttaaaaagatgtttatacaatgccagacacggataattcagatttagcttttagccataagaatccttccatggcttttatttaaaaatatgaaattttcacctcttggggtattttaattgtactgtctgaacccagggatcacaaattctgttcattggaaagggttttaaacggagtcggaacctgagtagatttccaaattttacagccaggactacagaagtgcatcattctagaatgtgtagacctgagtagcttatacactacagagcactttgcttatttgaaagtaattcagcaacaggtcactttgggatataacctgaacctttttttggagtggggtgggtagactacagtagacacaagggctggacatgcagatgcttaggggattagcgtttttcataatttgttctgtttgtcagttcattcctgtgtgttcttacctctacaaagtaaattacacatttagtttttagtgactttaacatgttactgaagcatttgaatataaagctattttagttttgatggcttaactgttccctgaggagttgagggttattgacactagagaaatgaattctcatttgatcctaattttccccgtattctacttgaacacattaaaaatactctgctgcctatacaatgtaaacctaggagcattaagacttgtcacacagtaaacctgatacatcagaggtgaataccagcacctattaggtttcattttgctgttttcaggaatgtaagaacacccatattggctactggaaattctagaagtcagtcaggttttaatttattccaggaggggcatcctcgacatcttatgtagatgatccacaacttcaaaatttagtctgggcctagtgcagtggctcacacctataatcccaacactttgggaggccaggagttttgagaccagcctgggaaacatctgtctctacaaaaaaatacaaaaattagctgggcatagtggtgcatgcctgtgtttctagctacgcaggaggattgcttgagcccatgagattgaggctgcagtgagctgtgatcgtgccactgacctccagcctgggggacagagcaagaccgtgtctcaaaaacaatttagtctgaaacacaattgtgctgaatctgtctgactataactctgaccacacagaaccagggctgcccctgtaatccccacagtaagaaagttgtatggcatattccaacaagtattggttcgtctggtgtctttagagctttactctgttgaagtgactgattctcaactgaacattatgtcgttactttgataagcattccacttttgttatttattagtgctatcttttttttttacgtgttaaatcttgtgattattaaaataaagtaccattgtaatttaaagtgaaaaaaaaaaaaaaaaaaaaaaaa

SEQ ID NO: 357 - DNA, 2333 bp, Homo Sapiens
gggccaggccgcgcccccgcgtgcgtgcgcggcccggcagagccgtgcgggcgcccgcgtactcactagctgaggtggcagtggttccaccaacatggagctctcgcagatgtcggagctcatggggctgtcggtgttgcttgggctgctggccctgatggcgacggcggcggtagcgcgggggtggctgcgcgcgggggaggagaggagcggccggcccgcctgccaaaaagcaaatggatttccacctgacaaatcttcgggatccaagaagcagaaacaatatcagcggattcggaaggagaagcctcaacaacacaacttcacccaccgcctcctggctgcagctctgaagagccacagcgggaacatatcttgcatggactttagcagcaatggcaaatacctggctacctgtgcagatgatcgcaccatccgcatctggagcaccaaggacttcctgcagcgagagcaccgcagcatgagagccaacgtggagctggaccacgccaccctggtgcgcttcagccctgactgcagagccttcatcgtctggctggccaacggggacaccctccgtgtcttcaagatgaccaagcgggaggatgggggctacaccttcacagccaccccagaggacttccctaaaaagcacaaggcgcctgtcatcgacattggcattgctaacacagggaagtttatcatgactgcctccagtgacaccactgtcctcatctggagcctgaagggtcaagtgctgtctaccatcaacaccaaccagatgaacaacacacacgctgctgtatctccctgtggcagatttgtagcctcgtgtggcttcaccccagatgtgaaggtttgggaagtctgctttggaaagaagggggagttccaggaggtggtgcgagccttcgaactaaagggccactccgcggctgtgcactcgtttgctttctccaacgactcacggaggatggcttctgtctccaaggatggtacatggaaactgtgggacacagatgtggaatacaagaagaagcaggacccctacttgctgaagacaggccgctttgaagaggcggcgggtgccgcgccgtgccgcctggccctctcccccaacgcccaggtcttggccttggccagtggcagtagtattcatctctacaatacccggcggggcgagaaggaggagtgctttgagcgggtccatggcgagtgtatcgccaacttgtcctttgacatcactggccgctttctggcctcctgtggggaccgggcggtgcggctgtttcacaacactcctggccaccgagccatggtggaggagatgcagggccacctgaagcgggcctccaacgagagcacccgccagaggctgcagcagcagctgacccaggcccaagagaccctgaagagcctgggtgccctgaagaagtgactctgggagggcccggcgcagaggattgaggaggagggatctggcctcctcatggcgctgctgccatctttcctcccaggtggaagcctttcagaaggagtctcctggttttcttactggtggccctgcttcttcccattgaaactactcttgtctacttaggtctctctcttcttgctggctgtgactcctccctgactagtggccaaggtgcttttcttcctcccaggcccagtgggtggaatctgtccccacctggcactgaggagaatggtagagaggagaggagagagagagagaatgtgatttttggccttgtggcagcacatcctcacacccaaagaagtttgtaaatgttccagaacaacctagagaacacctgagtactaagcagcagttttgcaaggatgggagactgggatagcttcccatcacagaactgtgttccatcaaaaagacactaagggatttccttctgggcctcagttctatttgtaagatggagaataatcctctctgtgaactccttgcaaagatgatatgaggctaagagaatatcaagtccccaggtctggaagaaaagtagaaaagagtagtactattgtccaatgtcatgaaagtggtaaaagtgggaaccagtgtgctttgaaaccaaattagaaacacattccttgggaaggcaaagttttctgggacttgatcatacattttatatggttgggacttctctcttcgggagatgatatcttgtttaaggagacctcttttcagttcatcaagttcatcagatatttgagtgcccactctgtgcccaaataaatatgagctggggattaaaaaaaaaaaaaaaaaaaaaaaaaaaaaaaaaaaaaaaaaaaaaaaaaaaaaaaaaaaa

SEQ ID NO: 358 - DNA, 516 bp, Homo Sapiens
tttctgtttttttttttaatctgccattagtaattaattctttgaagatactttggagattcattttcttgagtggcactgcatgctcattcagtgaaaacttgtggggtatagaaatggaatggagagtttcaaacagctttgctgaaactgtactttgggctccagacttcactgtccttaggcattgaaaccatcacctggtttgcattcttcatgactgaggttaacttaaaacaaaaatggtaggaaagctttcctatgcttcgggtaagagacaaatttgcttttgtagaattggtggctgagaaaggcagacagggcctgattaaagaagacatttgtcaccactagccaccaagttaagttgtggaacccaaaggtgacggccatggaaacgtagatcatcagctctgctaagtagttaggggaagaaacatattcaaaccagtctccaaatgggatcctgtggttacagtgaatgaccactcctgctttatttttcctgagattgcc

SEQ ID NO: 359 - DNA, 179 bp, Homo Sapiens
  misc_feature (17)..(17): n is a, c, g, or t
  misc_feature (20)..(20): n is a, c, g, or t
  misc_feature (94)..(94): n is a, c, g, or t
  misc_feature (144)..(144): n is a, c, g, or t
  misc_feature (154)..(155): n is a, c, g, or t
  misc_feature (163)..(163): n is a, c, g, or t
  misc_feature (172)..(172): n is a, c, g, or t
gataaagagaaccagtnatnaagtgaactacatgtgtaagtttaaaacaaagtataaatttattttgtttgtaacatttgtcttttcctatttnatttaaaatataatctcaattataaacttgtgttgatggtattatataangatgtaattnngggttatngcaccaaantggcaga

SEQ ID NO: 360 - DNA, 477 bp, Homo Sapiens
  misc_feature (390)..(390): n is a, c, g, or t
  misc_feature (398)..(398): n is a, c, g, or t
  misc_feature (407)..(407): n is a, c, g, or t
  misc_feature (425)..(425): n is a, c, g, or t
  misc_feature (437)..(437): n is a, c, g, or t
  misc_feature (443)..(443): n is a, c, g, or t
  misc_feature (451)..(451): n is a, c, g, or t
  misc_feature (469)..(469): n is a, c, g, or t
cctttttcttttacaaagttaaataccaaaataacattgagtcatttttaatacttagtgttgctggctagactacctattatcaccacaattacatttgctatgaggtttggatgtgggaaaccataatgaaacgtgccgctggcatggagggagtggtaggagacacagaacaggggtgggcaagctatcaaatgctcctgggtgtgaggaggcctcaggggcagccagggcacggggctacttcttgggccacgaggcttctgggcaagtctgggggtgggtacgcaaggaatttctccctgttcttatctgcctaggagggtcaaagggaaggtgaaatccctcttttttaaaaactggggtctttttgactgcccttccatgggngctccccnttaaaaggncaaaatttacaggccgtnggctcacgcccnttaatncccggcantttggggggggccaggtnggagggtt

SEQ ID NO: 361 - DNA, 2480 bp, Homo Sapiens
atggccgggccgcgcgcgtgcgcgccgctcctgctcctgctcctcctcgggcagcttctggcggccgccggggcgcagagagtgggactccccggcccccccggccccccagggcgccctgggaagcccggccaggacggcattgacggagaagctggtcctccaggtctgcctggtcccccgggaccaaagggggccccaggaaagccggggaaaccaggagaggctgggctgccgggactgccgggtgtggatggtctgactggacgagatggaccccctggacccaagggtgcccctggggaacggggaagtctgggacccccggggccgcccgggctggggggcaaaggcctccctggaccccccggagaggcaggagtgagcggccccccaggtgggatcggcctccgcggccccccgggacctcctggactccccggcctccctggtcccccaggacctcccggaccccctggacacccaggagtcctccctgaaggcgctactgaccttcagtgcccaagtatctgcccgccaggtcccccagggccccctggaatgccagggttcaagggacccactggctacaaaggcgagcagggggaagtcggcaaggacggcgagaagggtgaccctggcccccctgggcccgccggcctcccgggcagcgtggggctgcagggcccccggggattacgaggactgccagggccactcgggccccctggggaccggggtcccattgggttccgagggccgcctgggatcccaggagcgcctgggaaagcgggtgaccgaggcgagaggggcccagaagggttccgcggccccaagggtgacctcggcagacctggtcccaagggaacccccggagtggccgggccaagcggagagccgggcatgccaggcaaggacggccagaatggcgtgccaggactcgatggccagaagggagaggctggtcgcaacggtgctccgggagagaagggccccaacgggctgccgggcctccctggacgagcggggtccaaaggcgagaagggagaacggggcagagctggggagctgggtgaggccggcccctctggagagccaggcgtccctggagatgctggcatgcctggggagcgcggtgaggctggccaccggggctcagcgggggccctcggcccacaaggccctcccggagcccctggtgtccgaggcttccagggccagaagggcagcatgggagaccccggccttccaggcccccagggcctccgaggtgacgtgggcgaccggggtccgggaggtgccgaaggccctaagggagaccagggtattgcaggttccgacggtcttcctggggataaaggagaactgggtcccagcggcctggtcggacccaaaggagagtctggcagtcgaggggagctgggccccaaaggcacccagggtcccaacggcaccagcggtgttcagggtgtccccgggccccccggtcctctgggcctgcagggcgtcccgggtgttcctggcatcacggggaagccgggagttccggggaaggaggccagcgagcagcgcatcagggagctgtgtggggggatgatcagcgaacaaattgcacagttagccgcgcacctaaggaagcctttggcacccgggtccattggtcggcccggtccagctggcccccctgggcccccaggacccccaggctccattggtcaccctggcgctcgaggaccccccggataccgcggtcccactggggagctgggagaccccgggcccagaggaaaccagggtgacagaggagacaaaggcgcggcaggagcagggctggacgggcctgaaggagaccaggggccccaaggaccccaaggcgtgcccggcaccagcaaggacggccaggacggtgctcccggcgagcctgggcctcccggagatcctgggcttccaggtgccattggggcccaggggacaccggggatctgcgacacctcagcctgccaaggagccgtgttaggaggggtcggggagaaatcaggctctcgaagctcataaaattcaacgtgaggaagcaagtgacaaggacgcccgaagcacagtggacggtcatgaaggagcgggggtgtggcaggcgggtgacgtccaggagagggagcgcccctggctgcccctcggccgccgactggacgcgtgggccttgccagcgagcaccctcattgggctgtcgcctgacagcatacctcaaaaggccctagctaataaacctgtaagcccagcatttgagagaaggtagggtgtgtatatataaaaggttgtgtacaactccacgaggtgaaaaatattcagtaacttgtttgcatagcatttgtgtaaagactatgatctcatcccaataaaatgatatattaaatcttcagattaatgactggctacagagtaacaaaaaataaacaatttaatgtacagtaaattctctccca

SEQ ID NO: 362 - DNA, 152 bp, Homo Sapiens
gagcttggccggtttcgagtcgctgacctgcagcttccctgtggtttcccgaggcctccttgcttcccgctctccgaggagctttcatccgaaggcgggacgatgccggataatcggcagccgaggaaccggcaaccaaggatccgctccgg

SEQ ID NO: 363 - DNA, 456 bp, Homo Sapiens
  misc_feature (440)..(440): n is a, c, g, or t
tttttttttttttcggcacaaaagctcatgatttaatgaggaacagaaacaaaatctctgattgttggtgtttcaaacttcattggcgtcctctggcaagcacaagttgatccctctgcagcttcaataccctttagcctgatgacagcttcatttaacagatcatttttccttgatggaggtggcaagcgtaacagtgttctgggcctgcttcagtaatggcatgtcgatcatactcccttggaaagtaaaggccccctttcctaattgttgatgttctttaaaggcagcaatcagttcttcagcccacttaattttttcaggggaaggagaaaactgctcctggaccacggcaatttggttagggtgaatcacctgcttaccagtgaagcccatggcggctccttctcgtgactgtctaagcagcccagctccatctngaaagtcaatgtacac

SEQ ID NO: 364 - DNA, 1378 bp, Homo Sapiens
ggtagcagcatccaccgggcgggaggtcggaggcagcaaggccttaaaggctactgagtgcgccggccgttccgtgtccagaacctcccctactcctccgccttctcttccttggccgcccaccgccaagttccgactccggttttcgcctttgcaaagcctaaggaggaggttaggaacagccgcgcccccctccctgcggccgccgccccctgcctctcggctctgctccctgccgcgtgcgcctgggccgtgcgccccggcaggcgccagccatgtcgatgctgccgtcgtttggctttacgcaggagcaagtggcgtgcgtgtgcgaggttctgcagcaaggcggaaacctggagcgcctgggcaggttcctgtggtcactgcccgcctgcgaccacctgcacaagaacgagagcgtactcaaggccaaggcggtggtcgccttccaccgcggcaacttccgtgagctctacaagatcctggagagccaccagttctcgcctcacaaccaccccaaactgcagcaactgtggctgaaggcgcattacgtggaggccgagaagctgcgcggccgacccctgggcgccgtgggcaaatatcgggtgcgccgaaaatttccactgccgcgcaccatctgggacggcgaggagaccagctactgcttcaaggagaagtcgaggggtgtcctgcgggagtggtacgcgcacaatccctacccatcgccgcgtgagaagcgggagctggccgaggccaccggcctcaccaccacccaggtcagcaactggtttaagaaccggaggcaaagagaccgggccgcggaggccaaggaaagggagaacaccgaaaacaataactcctcctccaacaagcagaaccaactctctcctctggaagggggcaagccgctcatgtccagctcagaagaggaattctcacctccccaaagtccagaccagaactcggtccttctgctgcagggcaatatgggccacgccaggagctcaaactattctctcccgggcttaacagcctcgcagcccagtcacggcctgcagacccaccagcatcagctccaagactctctgctcggccccctcacctccagtctggtggacttggggtcctaagtggggagggactggggcctcgaagggattcctggagcagcaaccactgcagcgactagggacacttgtaaatagaaatcaggaacatttttgcagcttgtttctggagttgtttgcgcataaaggaatggtggactttcacaaatatctttttaaaaatcaaaaccaacagcgatctcaagcttaatctcctcttctctccaactctttccacttttgcattttccttcccaatgcagagatcaggg

SEQ ID NO: 365 - DNA, 427 bp, Homo Sapiens
  misc_feature (99)..(100): n is a, c, g, or t
tgggtgagctcgtgggaactgagaaactgtgtctagggcttccttagttatactgaatgctgcatgtagaggtctgcagggtggccagctgatggctgnnggaagatctgctgacttggattcagttactactaaaatggcaggtttagaaagaggagagaacttctagatccagaggaaataatcaggtaagtatgctaagatgtgtgtatgtgttagccaggcacggtggctcacgcctgtaatcccagcactttgtgaaggctgaggcaggtggatcaccaaggtcaggagctcaagaccagtctggccaacatggtgaaaccccgtctttactaaaaatacaaaaattagctgggtgtggtggcgggcgctgtaatcccagctactcgggaagctgaggcagagaatcacttgaacccgcaag

SEQ ID NO: 366 - DNA, 441 bp, Homo Sapiens
  misc_feature (370)..(370): n is a, c, g, or t
  misc_feature (399)..(399): n is a, c, g, or t
  misc_feature (406)..(406): n is a, c, g, or t
atgccatagtttttagaaacactaatttaaacaacaaatttaaggggtgctggcatatcccagtgacaccttcagttttattgctgcttagtattttctagtaaattagttttaattattggtagtctgttgggcaccatttgggaaagaaataaattggtctcagtgtagcagacttgtagccaaaaactttgaataaaaaatgagtataataaagaatattatttcatttttaaaggaattgtattattttgaagtgctgcgtggttgatatggtttggttgtgtctctacccaaatctcttattgaattgtagttcccataaatccccacaggggaggggacccagtggggagggtgactggaatcntggggggggcagttttcccccatggctanttctccnggatagtggagtggagttcttcaccggggatttgg

SEQ ID NO: 367 - DNA, 617 bp, Homo Sapiens
  misc_feature (379)..(379): n is a, c, g, or t
  misc_feature (457)..(457): n is a, c, g, or t
ctacatgagccatctatttacttagtaaccagtgttcttaatgaagtatttagtcttgggtttcttgtaaaatttctctgcattccttagacagtgtactatacatgaaatattcttgttgacctagtaatttatattattccatttaattcttaaacctatggcctttttattgagcacactcttaaatcattatttggcttgtaaacattcatctgaattgtggctacaatcctctttaaataatctaggaaaaaagaaagataaagcttacattttcacagttttggctcttaaacacattccacaaatgccattaagaatttattttgttttaggccagtcatggtggctcatgcctgtaatcccagcaatttgngaggctgaggcaagaactgcttgagcccaggagtttgagactagcctgggcaacatagcaagaccctgtctctaccanaaaaaaaaaagtttattttgttttagagtcatttaatgtgtttttatgcacaataattagtgggaggttgttttgttgctttggtttggttggatctgctatggtatgtattgctttccatgtggggaaaggttaacattgggaaccgctttctagtaat

SEQ ID NO: 368 - DNA, 5200 bp, Homo Sapiens
gaccacctgatcgaaggaaaaggaaggcacagcggagcgcagagtgagaaccaccaaccgaggcgccgggcagcgacccctgcagcggagacagagactgagcggcccggcaccgccatgcctgcgctctggctgggctgctgcctctgcttctcgctcctcctgcccgcagcccgggccacctccaggagggaagtctgtgattgcaatgggaagtccaggcagtgtatctttgatcgggaacttcacagacaaactggtaatggattccgctgcctcaactgcaatgacaacactgatggcattcactgcgagaagtgcaagaatggcttttaccggcacagagaaagggaccgctgtttgccctgcaattgtaactccaaaggttctcttagtgctcgatgtgacaactctggacggtgcagctgtaaaccaggtgtgacaggagccagatgcgaccgatgtctgccaggcttccacatgctcacggatgcggggtgcacccaagaccagagactgctagactccaagtgtgactgtgacccagctggcatcgcagggccctgtgacgcgggccgctgtgtctgcaagccagctgttactggagaacgctgtgataggtgtcgatcaggttactataatctggatggggggaaccctgagggctgtacccagtgtttctgctatgggcattcagccagctgccgcagctctgcagaatacagtgtccataagatcacctctacctttcatcaagatgttgatggctggaaggctgtccaacgaaatgggtctcctgcaaagctccaatggtcacagcgccatcaagatgtgtttagctcagcccaacgactagatcctgtctattttgtggctcctgccaaatttcttgggaatcaacaggtgagctatgggcaaagcctgtcctttgactaccgtgtggacagaggaggcagacacccatctgcccatgatgtgatcctggaaggtgctggtctacggatcacagctcccttgatgccacttggcaagacactgccttgtgggctcaccaagacttacacattcaggttaaatgagcatccaagcaataattggagcccccagctgagttactttgagtatcgaaggttactgcggaatctcacagccctccgcatccgagctacatatggagaatacagtactgggtacattgacaatgtgaccctgatttcagcccgccctgtctctggagccccagcaccctgggttgaacagtgtatatgtcctgttgggtacaaggggcaattctgccaggattgtgcttctggctacaagagagattcagcgagactggggccttttggcacctgtattccttgtaactgtcaagggggaggggcctgtgatccagacacaggagattgttattcaggggatgagaatcctgacattgagtgtgctgactgcccaattggtttctacaacgatccgcacgacccccgcagctgcaagccatgtccctgtcataacgggttcagctgctcagtgattccggagacggaggaggtggtgtgcaataactgccctcccggggtcaccggtgcccgctgtgagctctgtgctgatggctactttggggacccctttggtgaacatggcccagtgaggccttgtcagccctgtcaatgcaacagcaatgtggaccccagtgcctctgggaattgtgaccggctgacaggcaggtgtttgaagtgtatccacaacacagccggcatctactgcgaccagtgcaaagcaggctacttcggggacccattggctcccaacccagcagacaagtgtcgagcttgcaactgtaaccccatgggctcagagcctgtaggatgtcgaagtgatggcacctgtgtttgcaagccaggatttggtggccccaactgtgagcatggagcattcagctgtccagcttgctataatcaagtgaagattcagatggatcagtttatgcagcagcttcagagaatggaggccctgatttcaaaggctcagggtggtgatggagtagtacctgatacagagctggaaggcaggatgcagcaggctgagcaggcccttcaggacattctgagagatgcccagatttcagaaggtgctagcagatcccttggtctccagttggccaaggtgaggagccaagagaacagctaccagagccgcctggatgacctcaagatgactgtggaaagagttcgggctctgggaagtcagtaccagaaccgagttcgggatactcacaggctcatcactcagatgcagctgagcctggcagaaagtgaagcttccttgggaaacactaacattcctgcctcagaccactacgtggggccaaatggctttaaaagtctggctcaggaggccacaagattagcagaaagccacgttgagtcagccagtaacatggagcaactgacaagggaaactgaggactattccaaacaagccctctcactggtgcgcaaggccctgcatgaaggagtcggaagcggaagcggtagcccggacggtgctgtggtgcaagggcttgtggaaaaattggagaaaaccaagtccctggcccagcagttgacaagggaggccactcaagcggaaattgaagcagataggtcttatcagcacagtctccgcctcctggattcagtgtctccgcttcagggagtcagtgatcagtcctttcaggtggaagaagcaaagaggatcaaacaaaaagcggattcactctcaagcctggtaaccaggcatatggatgagttcaagcgtacacaaaagaatctgggaaactggaaagaagaagcacagcagctcttacagaatggaaaaagtgggagagagaaatcagatcagctgctttcccgtgccaatcttgctaaaagcagagcacaagaagcactgagtatgggcaatgccactttttatgaagttgagagcatccttaaaaacctcagagagtttgacctgcaggtggacaacagaaaagcagaagctgaagaagccatgaagagactctcctacatcagccagaaggtttcagatgccagtgacaagacccagcaagcagaaagagccctggggagcgctgctgctgatgcacagagggcaaagaatggggccggggaggccctggaaatctccagtgagattgaacaggagattgggagtctgaacttggaagccaatgtgacagcagatggagccttggccatggaaaagggactggcctctctgaagagtgagatgagggaagtggaaggagagctggaaaggaaggagctggagtttgacacgaatatggatgcagtacagatggtgattacagaagcccagaaggttgataccagagccaagaacgctggggttacaatccaagacacactcaacacattagacggcctcctgcatctgatggaccagcctctcagtgtagatgaagaggggctggtcttactggagcagaagctttcccgagccaagacccagatcaacagccaactgcggcccatgatgtcagagctggaagagagggcacgtcagcagaggggccacctccatttgctggagacaagcatagatgggattctggctgatgtgaagaacttggagaacattagggacaacctgcccccaggctgctacaatacccaggctcttgagcaacagtgaagctgccataaatatttctcaactgaggttcttgggatacagatctcagggctcgggagccatgtcatgtgagtgggtgggatggggacatttgaacatgtttaatgggtatgctcaggtcaactgacctgaccccattcctgatcccatggccaggtggttgtcttattgcaccatactccttgcttcctgatgctgggcatgaggcagataggcactggtgtgagaatgatcaaggatctggaccccaaagatagactggatggaaagacaaactgcacaggcagatgtttgcctcataatagtcgtaagtggagtcctggaatttggacaagtgctgttgggatatagtcaacttattctttgagtaatgtgactaaaggaaaaaactttgactttgcccaggcatgaaattcttcctaatgtcagaacagagtgcaacccagtcacactgtggccagtaaaatactattgcctcatattgtcctctgcaagcttcttgctgatcagagttcctcctacttacaacccagggtgtgaacatgttctccattttcaagctggaagaagtgagcagtgttggagtgaggacctgtaaggcaggcccattcagagctatggtgcttgctggtgcctgccaccttcaagttctggacctgggcatgacatcctttcttttaatgatgccatggcaacttagagattgcatttttattaaagcatttcctaccagcaaagcaaatgttgggaaagtatttactttttcggtttcaaagtgatagaaaagtgtggcttgggcattgaaagaggtaaaattctctagatttattagtcctaattcaatcctacttttcgaacaccaaaaatgatgcgcatcaatgtattttatcttattttctcaatctcctctctctttcctccacccataataagagaatgttcctactcacacttcagctgggtcacatccatccctccattcatccttccatccatctttccatccattacctccatccatccttccaacatatatttattgagtacctactgtgtgccaggggctggtgggacagtggtgacatagtctctgccctcatagagttgattgtctagtgaggaagacaagcatttttaaaaaataaatttaaacttacaaactttgtttgtcacaagtggtgtttattgcaataaccgcttggtttgcaacctctttgctcaacagaacatatgttgcaagaccctcccatgggcactgagtttggcaaggatgacagagctctgggttgtgcacatttctttgcattccagcgtcactctgtgccttctacaactgattgcaacagactgttgagttatgataacaccagtgggaattgctggaggaaccagaggcacttccaccttggctgggaagactatggtgctgccttgcttctgtatttccttggattttcctgaaagtgtttttaaataaagaacaattgttagatgccaaaaa

SEQ ID NO: 369 - DNA, 327 bp, Homo Sapiens
  misc_feature (292)..(292): n is a, c, g, or t
aaaagccctgggtcccagcagcagagagacaggacagaggggatgcttgggcggggagggacggtaacctgcagaacagattccatttttatagaacgagtacacgtttgctaaaacagtcctgctttcccagactggattcccaccacagggacagtcggaactcaggactagctccagcgaacatctttcctccgaattcaagccttctatcacaatgtcaaaacagctatttataaagccattttcattgtacttggataacagcacgagtcccaaaacttttaggaanttaaaatagggacattgggtttgattggaaaagag

SEQ ID NO: 370 - DNA, 329 bp, Homo Sapiens
  misc_feature (144)..(144): n is a, c, g, or t
tttttttttttttttttttttttttttaaacctatattatctttaataagaccgggtctggttcattggtatgcttttttttttttgccccacctcgctcttacctcaaaaagatttgtcgaatgagtgaaagatgaacaagtnggccaatggagacagagtgagggtcttggtggggataagtatgtgtaaaatctggattcagtctgcagtgaatagggtaaaatgggtcatctggttgtgaattggcagaccccatttgaaggaaacaattttgatctgggacatttaaaaatatttattgacttctgtttgctactttcctgatt

SEQ ID NO: 371 - DNA, 689 bp, Homo Sapiens
agttgaaatgtgatgactagcgttaagaacttgagagtaaaagcaacaataagattttttcacctcttccatgcttccacccccaaactgagaacatcactcaagtgtaggaagaaactgtaggtctatataaattttatttataatgtatgtgtaatatacataatcataatacagttctcagatgcagggaagaagtttggcatttaatcattgaggctttaggtttttgatgtgatcagactgggccatgtcaaacacggaattttcaccaacagttcactcaccctcctggtacattgccattccaaggaattctgagagtaggcaaacaaattttgccttcatggtacagttctcagtttttcttataggagaaatatggtatatgtttataagaatcttttatgagattatagatttcaatgctgtggatagtgtcttgcacccaaacaagaaagtccataatggaatgatcttccctcagcttcctatcgatttagttacctcttgaaagcacaaaaattaaaacatgggcatatgttgaatttttaaaaagcactttggagtgagcgaacatttcctgataaatgccttttagagataggttcttgatattcagacatctgcagaattgttctggtaccaaagtcattcacttcgaaataaacacaggtcttcaacaggat

SEQ ID NO: 372 - DNA, 291 bp, Homo Sapiens
  misc_feature (53)..(53): n is a, c, g, or t
  misc_feature (56)..(56): n is a, c, g, or t
  misc_feature (139)..(139): n is a, c, g, or t
  misc_feature (162)..(162): n is a, c, g, or t
  misc_feature (254)..(254): n is a, c, g, or t
atagcgcggaccggcgtgtccttggacttagagagtggggacgtccggcttcngtncgggagtgttcgttgtgccagcgactaaaaagagaattaaatatgggtgatgttgagaaaggcaagaagatttttattatgangtgttcccagtgccacaccgttnaaaagggaggcaagcacaagactgggccaaatctccatggtctctttgggcggaagacaggtcaggcccctggatactcttacacagccggncaataagaacaaaggcatcatctggggagaggataca

SEQ ID NO: 373 - DNA, 476 bp, Homo Sapiens
agaagagtaattcttattttatttataatgaaatgcgaccacaaggttacatagtagtaaattcacagtagtgattttttggtttttcagtaacaaatccgtaaatcacaaacactacccagaaatacttaaatcactttacaatcgcagggtctctgctgcaggactatttaaataaatatgctaacatttctgtgctactgtaagtaacctatcactttttaaaaataaagcccaatttttaagtgaccttaagaaatatctagtaaggcttccagggtagtgaagtttgagcagtaattttcttagagcttgacctttgtttgtttgtttcttgctgttttcagagtcctaaagcaagaaagagtttaatggacttgcctgcaggacagcaggctccccagaagacagtgctgtgctaaagccatttactctagcgggagaagccagtgtcagtgagggaaaggaataaagca

SEQ ID NO: 374 - DNA, 1585 bp, Homo Sapiens
gcctggtcccgcctctcctgccccttgtgctcagcgctacctgctgcccggacacatccagagctggccgacgggtgcgcgggcgggcggcggcaccatgcagggaagctgccaggggccgtgggcagcgccgctttctgccgcccacctggcgctgtgagactggcgctgccaccatgttccccagccctgctctcacgcccacgcccttctcagtcaaagacatcctaaacctggaacagcagcagcgcagcctggctgccgccggagagctctctgcccgcctggaggcgaccctggcgccctcctcctgcatgctggccgccttcaagccagaggcctacgctgggcccgaggcggctgcgccgggcctcccagagctgcgcgcagagctgggccgcgcgccttcaccggccaagtgtgcgtctgcctttcccgccgcccccgccttctatccacgtgcctacagcgaccccgacccagccaaggaccctagagccgaaaagaaagagctgtgcgcgctgcagaaggcggtggagctggagaagacagaggcggacaacgcggagcggccccgggcgcgacggcggaggaagccgcgcgtgctcttctcgcaggcgcaggtctatgagctggagcggcgcttcaagcagcagcggtacctgtcggcccccgaacgcgaccagctggccagcgtgctgaaactcacgtccacgcaggtcaagatctggttccagaaccggcgctacaagtgcaagcggcagcggcaggaccagactctggagctggtggggctgcccccgccgccgccgccgcctgcccgcaggatcgcggtgccagtgctggtgcgcgatggcaagccatgcctaggggactcggcgccctacgcgcctgcctacggcgtgggcctcaatccctacggttataacgcctaccccgcctatccgggttacggcggcgcggcctgcagccctggctacagctgcactgccgcttaccccgccgggccttccccagcgcagccggccactgccgccgccaacaacaacttcgtgaacttcggcgtcggggacttgaatgcggttcagagccccgggattccgcagagcaactcgggagtgtccacgctgcatggtatccgagcctggtagggaagggacccgcgtggcgcgaccctgaccgatcccacctcaacagctccctgactctcgtggggagaaggggctcccaacatgaccctgagtcccctggattttgcattcactcctgcggagacctaggaactttttctgtcccacgcgcgtttgttcttgcgcacgggagagtttgtggcggcgattatgcagcgtgcaatgagtgatcctgcagcctggtgtcttagctgtccccccaggagtgccctccgagagtccatgggcacccccggttggaactgggactgagctcgggcacgcagggcctgagatctggccgcccattccgcgagccagggccgggcgcccgggcctttgctatctcgccgtcgcccgcccacgcacccacccgtatttatgtttttacctattgctgtaagaaatgacgatcc

SEQ ID NO: 375 - DNA, 418 bp, Homo Sapiens
tttttttttttttttttttttttttttttttttttttttttctcgggcaagtggtttattgatggagtgctcttaggaaaaggggagtgagggaagcagcgtaggacagaggaaaaaaactgagtaaaaatgtgctctcaaaaaaagactgacttcagcttgattccatgaggagctctgggaaaggaagttccttgatgtaagaggtcagtcttttgtccctccatacaagaggtagcaattcttttctagagatggcctcaaaattagaatacatcaaaatcacttggagggtttggtaaatcaaaatgctgtgctaacccccaaagattctgattcagtaggtctgagggggggcctgaggatttgtatttccagcaagttcacaggtaatgcttatgatgcactttgaaaacct

SEQ ID NO: 376 - DNA, 250 bp, Homo Sapiens
ggatccctctgggaggctgcagtgcaggcgcgttctcctagttcctccagatgctccacaatctggtctgaggtcaccgtgagagcccagggaggagctgtgagacactggaaccctaacctctcatatgcaagacacacccgctcatcacagtcgtgaccagggcacagcaccgtcaatgtcctcttggccaggcatgaagataaggatgtctccaggggcccccgacaggtgcacctgtaaggactgc

SEQ ID NO: 377 - DNA, 587 bp, Homo Sapiens
tgcctctgtttctccacgagggggggttaaaggcccccaaaacatgcacacatgaaaagggcaaaaagtaaccgtccttgacagggagtcttaactagagaaggaaacgggactaaactggcgggctccgtggaagcgtggccggcagcgtcccggacgaggagatgtctttggtggacttgggaaagaggttgctagaagcagcaagaaaaggccaagatgatgaagtgagaacgttgatggcaaatggcgccccattcaccacagactggcttggaacatcacccctccaccttgcagctcaatatggtcattattccacagcagaagtactccttcgagcaggtgttagcagggatgcccggactaaagtagacaggacccccttgcacatggctgcagccgatggacatgcgcacatcgtggaactgcttgttcggaatggtgcagatgtgaatgccaatgacatgctgaagatgacagctttgcattgggccacagagcgccaccatcgagatgtcgtagaggtacttatcaaatatggagctgatgtccatgctttcagcaaatttgataaatcagccttt

SEQ ID NO: 378 - DNA, 219 bp, Homo Sapiens
gcatcaccaactggtgacttgaatgagccatctgagggcaggcggaaatacagtatgttcagttttagacatgctggatttgagataaaagtgggacctccagagcctttaggtaactggatacacaaggcaacagagagtaagttacctaagaaaataccagagaaaaagtccacaactagtcctgaggtatacttatgaatgcgtccgtcgaagttg

SEQ ID NO: 379 - DNA, 332 bp, Homo Sapiens
  misc_feature (324)..(324): n is a, c, g, or t
  misc_feature (331)..(331): n is a, c, g, or t
caagtgaattttttgccaaacttagtaactctgttaaatatttggaggatttaaagaacatcccagtttgaattcatttcaaactttttaaatttttttgtactatgtttggttttattttccttctgttaatcttttgtattcacttatgctctcgtacattgagtacttttattccaaaactagtgggttttctctactggaaattttcaataaacctgtcattattgcttactttgattaaaaaaaaaaaaaaaaaaaaaaaaaaaaaaaaaaaaaaaaaaaaaaaaaaaaaaaaaaaaaaaaaaaaaaaaaaaaaaattnaccaaanc

SEQ ID NO: 380 - DNA, 771 bp, Homo Sapiens
ggagaggggatctggggacttgggtgtgacacctgcttgacagaggcaggtctgtggccatgggaccaaccttcaattccattccaagtcagacctttgcatttgttggatctcgtggcttctttttaatcttttgttggggattagtttcatgctgcacataatggggttgcacatggatctgacccaggactttggagccacccacactgggaagactatgctatggcagtcgagtcttctaggtagtttcatcagttcccttaggacgcgggtctccttgggctcccccaatgggttctgcgaagaggcagtggaataaggcatgaggagagggtctcttgagaatttgccaatatgaaggagtggccacaggtctgaaagggaacatagacatgatcctgatcatagctttggcctgggtgttaggtcagaaggagtactggtgcgtgggggccttaccccagggttgagtattttatatgtaaaatgttatctgctccttaggctgcattgtaatttcagagaaggctgcagaggcctgggttacacagtcctgagtcacaacgtgggaaggaatctctgtcacgggaaatgtgggtggaagcagcttggcagctgagggcgtgcttcaagctcctccctctaatggggcgccatggaacatgttccggatggacccgcttttgaagccccgggactgttccaggccaagggcccttgaacagcctgtttaatgggggcaattccagaaacataaacacattattt

SEQ ID NO: 381 - DNA, 5413 bp, Homo Sapiens
gaagagggatagggccagcaaggcagggatcgaacgagtgtctggcagccgggagcccagcgaagagagcgagcaagcttaggaaaacgagcgaagtaaagggagtaggggagactgagactgaccggtagccaggcaggcggacggacgcacgcccggacagactgagcaggcgccggagaaccactcacaggttccccccgcctttccctttgaaagctaggattttgcctttcccgtggcgcccgagagagaatgctggactctgccgacttcagcgcaagctaagatttctcagctagggacaaacgatcagcccaatcctgagaaggggggaaccaagcaccccgtccccatccccctcccctcccccgactaaactcgggcgccaaacccagcccttctctaaccaccctacttcctcctctcctttctagcatggtggctgtatggacagtctgacagaacagagactgacatctcccaatctgccggccccccacctggaacactacagtgttctgcattgcaccatgaccctggatgtgcaaactgtagtcgtttttgccgtgattgtagtcctcctgcttgtcaatgtcatactcatgtttttcctgggaacgcgctgaatggagtccagccacctgagctgtcgcgaactctcgctttgatttcatcccgagagccaccgagaaaaaaaaaaaatcacagacagagacagggaaagagagagaaagaacaagctttcttactcaggggggaaaacgttttgagcttcaacatggcctcgctgtgatatgtatgacgttgctgatcactggagattccatcgttagtgctgaggcagtatgggatcacgtcaccatggccaaccgggagttggcatttaaagctggcgacgtcatcaaagtcttggatgcttccaacaaggattggtggtggggccagatcgacgatgaggagggatggtttcctgccagctttgtgaggctctgggtgaaccaggaggatgaggtggaggaggggcccagcgatgtgcagaacggacacctggaccccaattcagactgcctctgtctggggcggccactacagaaccgggaccagatgcgggccaatgtcatcaatgagataatgagcactgagcgtcactacatcaagcacctcaaggatatttgtgagggctatctgaagcagtgccggaagagaagggacatgttcagtgacgagcaactgaaggtaatctttgggaacattgaagatatctacagatttcagatgggctttgtgagagacctggagaaacagtataacaatgatgacccccacctcagcgagataggaccctgcttcctagagcaccaagatggattctggatatactctgagtattgtaacaaccacctggatgcttgcatggagctctccaaactgatgaaggacagccgctaccagcacttctttgaggcctgtcgcctcttgcagcagatgattgacattgctatcgatggtttccttttgactccagtgcagaagatctgcaagtatcccttacagttggctgagctcctaaagtatactgcccaagaccacagtgactacaggtatgtggcagctgctttggctgtcatgagaaatgtgactcagcagatcaacgaacgcaagcgacgtttagagaatattgacaagattgctcagtggcaggcttctgtcctagactgggagggcgaggacatcctagacaggagctcggagctgatctacactggggagatggcctggatctaccagccctacggccgcaaccagcagcgggtcttcttcctgtttgaccaccagatggtcctctgcaagaaggacctaatccggagagacatcctgtactacaaaggccgcattgacatggataaatatgaggtagttgacattgaggatggcagagatgatgacttcaatgtcagcatgaagaatgcctttaagcttcacaacaaggagactgaggagatacatctgttctttgccaagaagctggaggaaaaaatacgctggctcagggctttcagagaagagaggaaaatggtacaggaagatgaaaaaattggctttgaaatttctgaaaaccagaagaggcaggctgcaatgactgtgagaaaagtccctaagcaaaaaggtgtcaactctgcccgctcagttcctccttcctacccaccaccgcaggacccgttaaaccacggccagtacctggtccccgacggcatcgctcagtcgcaggtctttgagttcaccgaacccaagcgcagccagtcaccattctggcaaaacttcagcaggttaacccccttcaaaaaatgatacctacagggaggcagataattttaaaataaagtaaataaaattatatttatagatggaccttttttcggagaagcactgttgaaatttatacacacacacacacacagagacccttgagtacacatacacacacacacacacagacacacacacacacacacacacacacacacacacagagagataaggaacaaaagtgttttctgttgttttggggaagtgaaatatgtggttggtaggaagaggtaccaatgacttccaaacatgtgattccgtcttaaaagttttccatttttaccctgtcccccttccctttgctttcagaagttgacatttctattcattgcttttcttgttaagataatctctttactcccctgtgagtgattcactgccttgtcattattacgatagatgtgtttgtattgttttttttctgatgatactgatgttgatgaatttttaattttatttgatgtggtagagttgggaggtttcagggttttttcccctcttttactttccattgaggaagggaatgagctcctttctcctctccttcagccaatcattatcaaatgttccttcagccctgcagttgccccaaataaccttttttcagcatcctctgtcctcagtcatgccagtctggacatgctctgttgtgccctgtgacaaaactgctcagtattcctattgcttttactgtgttttaggtactgtgaagggatcaaaaaaccaaacagaagcaagggagtatcagactatgatgatgctggagtggacttctgttcagggaacattttgcattcaggctgtttcttctatcactggggtttcccatgttgcagcacttctgggtcgttgcaattttgcatctaggagttagtttgatcgagttattctcttttttcaagtcacttttgttataggtctccccctaggcctgtctctcccttagcccaaaagatctgaactggaagcagaggttgagattctgcctcccaggagagggatttacctgccccctagtaccagataggtttagggcagtgatctctacagcaatcagttcagtgtcctggttgtccctgctcccatttacagatgtttgggcagcattgatagaagtatggaggggttcaagacagagcccacctgatcaagatcatcagctaccttcaaattattgacctggacagggtccaagtctgatagtaaccttttacaagaaagaacagggatgggaatggaaagagatagccttgatccacagtattgtacctgcattttctaccaccctaaaattgtgtgagacttctcccattgttaacagattgcatggacaatcttccctggcttctttctttccctctctctttcttctttctcctgccatcctagcacaggaggatttttggtattgatatagttaaagctgttctggcactcaaagaaggccgtgtttccaacatcctctcatcccaggacatttggggcaagtgagttaggggcccaggggcaattttccctctgaataacgtgtctgaggcagggatgctaccctcaggctcgcttttggccagctttttgcttgggaaaatctaacttctttcacaaggaggcaggcttcctatggatgttggagtacctgtttttcctccacacatagcccttttcatggatagaccttgaacaacaaaaagggtataagggaataaggatgaactctgctgtgaagagcaagccactgtagtgaggaatgtggagactgggagtctgtcctaaaccccatgggagaagacttcatcatgacaggacttcagcttaccaagcagcagccatagctgtgtggaggcttcagcatagctagcatgtttactgctctatgcctcctgatccagaccaggcattgcccagcctgggaatcttttctttgtgggaatcaaattacaagctatttaagtttatattccatcacaaccaagtcagacttgtattataagtcaaggatgagcctgatctggggagagggccggggctcgggactggccaccactgttcagcacatgacctaactacgtaagcctctttggcaagggtcctggtgcccagcacccaggctaaaatatcctgtctggcagagtgttttggtagctatgcaggcctcccttcagtgtacctctttttccaacttctcactcctccttactaggcttggccttgacatgcttcttcgagggttggcagcacaccgggaggggatgcttggacaagtttctgggcctacatttcttgactaggccctctcatttcctccctccttggggcttctgcccagggctccaggatcagggatattacttctcaacccgcacttctcctctactgaacccactggcatcacctgatgccactaatttgtgaacaacaagaaatcatttccccattggttggagtattccctcagcctatagcatcaaagcagaccagtggccaacagccccaaggggagcccaattaaatacctgggttcagtatcctaacctgttatgtcctgacagcaatggtaaccccagtaattctgtaatgttgtaatttccgcatggccctgagctcccttttcctcaactcagtgaggccaggatttgctctccaaaaggctttgctagtgtgttcaatgggacctgctgtggggagtcctaagacagacatctaattattctctctttttccccccctctctatgtgtatatttctaatggatctataagaacagcaacaagagagttctaacaattctagtgtgaagccaaatagtgatcttttagtgctttggggatggggtgggctggggtggatggatgggcaacagtgactttgattacccttgctgctctgcatttgccagtttattcttttgtttcttttatctgactgactctgtcaaacaagtgtcaaagttgtgtgttaaaaaatgtttaacaaaaaaaaatgttgtaatgacacaaagccttatgaaaatatttatggagttcaataaaagaagtaaaaagac

SEQ ID NO: 382 - DNA, 352 bp, Homo Sapiens
gcggccgcctactactactaaattcccccccggtcgacctccagaccctgcctggccacaattcaagttaaggcaacaaacatataccttccatgaagcacacacagacttttgaaagcaaggacaatgactgcttgaattgaggccttgaggaatgaagctttgaaggaaaagaatactttgtttccagcccccttcccacactcttcatgtgttaaccactgccttcctggaccttggagccacggtgactgtattacatgttgttatagaaaactgattttagagttctgatcgttcaagagaatgattaaatatacatttcctacaaaaaaaaaaaaaaaagtcgacg

SEQ ID NO: 383 - DNA, 4147 bp, Homo Sapiens
ccgcgcgcggcggcccgaggcggcggcggggacgcggggacgcgaggacgcggctttgtgcaggcgggtcgcggggcgcccatggcggagtgcggccgggggggcgccgccggcggggccctgcccacctccccgggcccggccctcggcgccaagggcgccctgaaagccggagtgggggaaggcggtggcgggggaggtcgcctcggccacgggcgggcgcgctatgacagcggcggggtttccaacggagactgcagcctcggcgtgtccggggacgaagcccgggctagccctaccaggggaccccgcggcgttgcgctcgccccgacccccagcgcggtcgtctgtaccctcccccgggagagcaagccgggcggcctgccccgccggagcagcatcatcaaggatggtacaaaacagaagagggaacggaaaaagacagtctcattcagcagcatgccaacagagaagaagatcagcagtgcaagtgattgtattaattcaatggttgagggttcagaactcaaaaaggttcgctccaactctagaatttatcataggtactttttactggatgctgacatgcagagcctaaggtgggagccatctaagaaggattctgagaaagccaagattgacattaaatccatcaaggaagtgagaacaggaaaaaacacagacatattccgcagcaatggcatttctgaccagatatctgaagattgtgcgttttccgtcatatatggagagaattatgagtcactggatttggttgccaactccgcagatgttgcaaacatctgggttacaggactgcggtacctaatttcttatggaaaacatacacttgatatgttagaaagtagccaagataacatgaggacttcttgggtttcacaaatgtttagtgaaattgatgtagataaccttggacatataactctgtgtaatgctgtgcaatgtatcagaaacctcaatcctggtttaaaaacgagcaaaattgagcttaagttcaaagaattgcataaatcaaaggacaaagctggtaccgaggtcacaaaggaagaatttattgaggtttttcatgagctttgtactagacctgaaatttatttccttttagttcagttttcaagcaataaagaattccttgataccaaggaccttatgatgtttcttgaggcagaacagggtgtggcacatataaatgaggaaataagccttgaaattattcacaaatatgaaccatccaaagagggtcaggaaaagggctggctctccatagacgggttcactaattaccttatgtcacctgactgttatatattcgatccagaacataagaaggtctgtcaggatatgaagcaacctctgtctcattactttataaactcatctcataatacatacttaatagaggatcagttccgaggtccctccgacatcacaggatatattcgagctcttaaaatgggttgccggagtgttgaattagatgtatgggatgggccggacaatgaacctgtaatttacacaggccacaccatgacctctcagatagttttccgcagtgtcattgatattattaacaagtatgcattctttgcttcagagtatcctcttatcttgtgtttagaaaaccactgttccattaaacaacagaaggtaatggttcagcacatgaagaaacttttaggagacaagctctatacaacatcacccaatgttgaggaatcttatctaccatccccagatgtcctgaaagggaaaatactaattaaagcaaagaagctgtcctcaaattgctctggggtagaaggagatgttactgacgaagatgaaggagcagaaatgtctcagaggatgggaaaagagaacatggagcaacccaataatgtgcctgtgaagcgatttcagctttgtaaagaactgtctgaactggtcagcatctgcaaatcagttcagttcaaagaatttcaggtgtcgtttcaggttcagaagtactgggaagtctgttcctttaatgaagtgcttgccagcaagtacgccaatgaaaatccaggggactttgtaaattacaacaaacgttttcttgctagggtttttcccagtccaatgagaattgattccagtaacatgaatcctcaagatttttggaaatgtggttgccaaattgtagccatgaactttcagacaccaggactgatgatggacctgaatattggctggtttaggcagaacggaaactgtggctatgtcctccggccagccatcatgagggaggaggtctccttcttcagcgccaatacaaaagactctgtcccaggggtctcacctcaacttcttcacattaaaatcatcagtgggcagaactttcccaagcccaaaggatcaggtgccaaaggtgatgtggtagatccttatgtctatgttgaaatccatggaatccctgctgattgtgcagaacaaaggacaaaaacagtgcaccagaatggagacgctcccatttttgatgaaagctttgaatttcaaatcaacctgcctgaactggccatggtgcgctttgtagtgctggatgatgactacattggggatgaattcatcggccagtacacaattccctttgaatgtttacagacgggctaccgccatgtccccctgcagtccttaactggagaggtccttgcacatgcttctttatttgtccacgtggctattactaaccgaagaggaggaggaaagcctcataaaaggggcctttctgtgagaaaagggaagaaatccagggaatatgcatctttgagaacactgtggattaaaaccgtggatgaggtattcaagaatgcccagccccctatacgggatgccacagatctgagagaaaacatgcagaatgcggtggtgtcattcaaggagctgtgtggcctctcctctgtggccaatctcatgcagtgcatgttggcggtgtctccccgctttctggggcccgataacacacccctagtggtcctaaatctcagcgagcagtaccccacaatggagctgcagggaattgtgccggaggttctgaagaagatcgtaacaacttatgacatgatgattcagtccctcaaggcgttgattgaaaatgcagatgctgtatatgaaaagatcgtacattgtcagaaggcagccatggaattccatgaacacttgcacagcataggcaccaaggaaggtttgaaggaaagaaaactacaaaaagcagtggagagctttacctggaatattaccatcttaaagggacaagcagatcttttgaaatatgctaagaatgagacattggagaacctgaaacaaatccattttgctgctgtttcatgtggactgaataaaccaggcaccgaaaatgctgatgtccagaagccacgccggagcttggaagtcatacccgaaaaagcaaacgatgaaactggagaatgaggaaacttacaataaaccattatggagtttataactctaggaccaattgtagtcagatgggacatttgctttgcactcactaatgagaataatattcgggattttaaagcacaactggaatagctaattacagtctattaaaactgtgaatgtatgtagcaatcctgcgtgtgaaggcaaataaactctttaacaggcaattatattgctggccaaaatatgctatatttgtatacaaagacattctaactcagttccagtatgaagaaagattattcactctagctccactgagaaacattttcctaagtgaaaacaatttcttaagatggaaatggattggattgtcaaattattatttattggagaaaaaaacctgatctacacatttttacttatatggggttgccagagtctctgggttctagatgattttggtggcatgcttgctgagccataattactaaagagaatgtaagtggacgggttccctgaatccccggggtccttggagagccatcgaggagaatgtgcaattggactgaagctccctggctgaagatacatgccgagtcagcacatgggtagagatgatgtaaaagcagccaatctggaaacaatacattgtaaatagtttttcattgtatgaagtagtgttcacattaaaaagatgttttatgat

SEQ ID NO: 384 - DNA, 360 bp, Homo Sapiens
ctgactagtggactcagcaaactgctgacagagggagaacaggtccccaggacctgaggaaaaggcatcagaaccatgagtttacacatacctgatgcagattccacgtgggccccgtttaccttcagaggagtcaggacaactcgaggcagcatcaccccagtctttttcttttgtttgttcgcctgtgaggaagctctgtagctgtccctgggattggaaagaggtcgactctgagattctgtagaacaggatgcgttcgaagatgtttcatcaagagatacatcgttttcaccactcacagtgctggcttcattagacccacagctctccacaacagccgtgtcctctggctcctct

SEQ ID NO: 385 - DNA, 1088 bp, Homo Sapiens
gagcctacggatttctgctatcattctgcatcccaactatgaccccatcctgcttgatgctgacatcgccatcctgaagctcctagacaaggcccgtatcagcacccgagtccagcccatctgcctcgctgccagtcgggatctcagcacttccttccaggagtcccacatcactgtggctggctggaatgtcctggcagacgtgaggagccctggcttcaagaacgacacactgcgctctggggtggtcagtgtggtggactcgctgctgtgtgaggagcagcatgaggaccatggcatcccagtgagtgtcactgataacatgttctgtgccagctgggaacccactgccccttctgatatctgcactgcagagacaggaggcatcgcggctgtgtccttcccgggacgagcatctcctgagccacgctggcatctgatgggactggtcagctggagctatgataaaacatgcagccacaggctctccactgccttcaccaaggtgctgccttttaaagactggattgaaagaaatatgaaatgaaccatgctcatgcactccttgagaagtgtttctgtatatccgtctgtacgtgtgtcattgcgtgaagcagtgtgggcctgaagtgtgatttggcctgtgaacttggctgtgccagggcttctgacttcagggacaaaactcagtgaagggtgagtagacctccattgctggtaggctgatgccgcctccactactaggacagccaattggaagatgccagggcttgcaagaagtaagtttcttcaaagaagaccatatacaaaacctctccactccactgacctggtggtcttccccaactttcagttatacgaatgccatcagcttgaccagggaagatctgggcttcatgaggccccttttgaggctctcaagttctagagagctgcctgtgggacagcccagggcagcagagctgggatgtggtgcatgcctttgtgtacatggccacagtacagtctggtccttttccttccccatctcttgtacacattttaataaaataagggttggcttctgaactacaaaaaaaaaaaaaaaa

SEQ ID NO: 386 - DNA, 496 bp, Homo Sapiens
tttgtgatttcacccatgggtcctgcgctttcccctggttgcttcttcttgaatttctttgacttttcttccgtggcaatgggttgattctttggccttacacccaagaagccactgcagttcggggctccacatttgcaaacagtctttccattcccaagacattctaggttgtagttgaaggtaagttcagtgcctgctttaatgtcacttagtgcaaaaaggcctacacgggtatctccattcacagaccacttctgtgtttcacagttgggctggcagcaatgattcatgaaccgagcatagtttcctttgggaccagcatcaatgattcggtctttgtctagggtgagcatatagaaattagtgatatcatgttcttgagcatagcgaattcgagctctgcattcttcttcatctataagctcacccacatactcattcacaaattcaccctttttaatatctgtttttgtccgtagaccccaaccccgct

SEQ ID NO: 387 - DNA, 366 bp, Homo Sapiens
ctacagagtgaatgtcagaaagtgtctctctcctagtgggcttttccgcaggccaagtccagcttatagacccaatcaaaaaagaaactagcaaactttttaatgaggaaatggcaagttcttagcgtgcgtgagccaggacgggtttctgcgggtgttcaactttgactcagtggagctgcacggtacgatgaaaagctactttgggggcttgctgtgtgtgtgctggagcccggatggcaagtacatcgtgacaggtggggaggacgacttggtgacagtctggtcctttgtagactgccgagtaatagccagaggccacgggcacaagtcctgggtcagtgttgtagcgtttgacccttatac

SEQ ID NO: 388 - DNA, 1678 bp, Homo Sapiens
agacgatccgctagccacattaggcgctcggtctctgcgtccgcccctcccgtgcctcagagacttgcgctccccaggcccgagcccctgtcggcccatcctcgagcccgtgtggctcgcgaacctctaactccagccgctgcagccccctcccaggcccggcgtccccgagccccgcgggcgccgcgcctgcccttctttggctacgctgcagccgcggtgtcggcgagtcctcccgggttgcccccgcgggcgtcagagggagggcgggcgcccgcgtggtgacggcgacgcctgcagcccaaggagcgctccactcgctgccgccggaggggccggtgacctcttggctaccccgcgtcggaggcttagatggctcaggcgaagatcaacgctaaagccaacgaggggcgcttctgccgctcctcctccatggctgaccgctccagccgcctgctggagagcctggaccagctggagctcagggttgaagctttgagagaagcagcaactgctgttgagcaagagaaagaaatccttctggaaatgatccacagtatccaaaatagccaggacatgaggcagatcagtgacggagaaagagaagaattaaatctgactgcaaaccgtttgatgggaagaactctcaccgttgaagtgtcagtagaaacaattagaaacccccagcagcaagaatccctaaagcatgccacaaggattattgatgaggtggtcaataagtttctggatgatttgggaaatgccaagagtcatttaatgtcgctctgcagtgcatgttcatctgaggtgccacatgggccagttgatcagaagtttcaatccatagtaattggctgtgctcttgaagatcagaagaaaattaagagaagattagagactctgcttagaaatattgaaaactctgacaaggccatcaagctattagagcattctaaaggagctggttccaaaactctgcaacaaaatgctgaaagcagattcaattagtcttcaaacctaagagcatttacacaatacacaaggtgtaaaaatgataaaatactattttaattgataactagttctttgttaggtataaccacttagttgacactgatagttgtttcagatgaggaaaatattccatcaagtatcttcagttttgtgaataacaaaactagcaatattttaattatctatctagagattttttagattgaattcttgtcttgtactaggatctagcatatttcactattctgtggatgaatacatagtttgtggggaaaacaaacgttcagctaggggcaaaaagcatgactgctttttcctgtctggcatggaatcacgcagtcaccttgggcatttagtttactagaaattctttaccttaagcagcacacacatttactacacacacagtgttaacaaagcactgtgcttagagggtaaaaaggaatcacaaaacaagaatctttccaaagttgtctcattcagcaatgttaaggcatctgtatcaaattattttggatgtaaagattcctgtgtctcataatatgaatgtattttttgatatacaagaaactgacataaaatatgagaaaaccacctataatttaccactgtgaacaattatatatctatctgcttcatcttttctcaaatgcatcaattctct

SEQ ID NO: 389 - DNA, 4023 bp, Homo Sapiens
ctgccaccttctctcctatgcctggctgtggttgcttctcttcctcctgctgccgctgctgctactgccactgcccagtacacaccgccagcccctcggggtgtggtttccccagacctgcccccaacggtgggacccagccttctcccggcgtctcctgccagcttcctgcaaagcccaggagcccccctccctggagacacacccaactccctttcaacaccccacccccctcttaatcccattttggggttaacccccttcctcttatttagtcttcatagatcccctgggtgctctgggattgtgcccaacttcctaacatttgagtcccggcccttggaattccccaggcccctttttcctccctgtagaactcctgagagtgtcgaccaggctttgttggcccgtctagatacccacctcccccagataactctcagcctctcaaaaaataacccagccccctgtctacccctttagataaccccttcccctctccagccctactaggaggctctggcctctcctttcttccccagaactcctgtagagtatagacacccccccgggctattcttggcaactctaggcagtcccaagacacctttcagcctctttacaacctcctggatccacagccacccctcaagatgcaccagctccctttccagatccatgaggggggtctaaccctcttatgcttcccctagaagtcttgagggtgtggacaaccctcctcacctgtctcagcccctctagaacccccacttccaggcactctcagtctctttcaagcacctctggtcccatttctaccctctggatgccccagtctcctctccaccactgcaaaggaattccaggctcttctgccttccctgagactcttgagagtgcagagaattccccacgtgtttcttggcccctctagacgcccccagacacctctcaggcacaggctgactcctttagaatcatctcagtctctctaaaccctccctcagctccttcttggccccatccccacaccccttttctgctcttctccatgtccccaaggcccttctcagtccctcagaacattgcccaggcccctcctaggttctgtaaatgtcccccagactccttcccatctctttagttcttcctcctggttcctcttggcctctctagacacccccagtttccttgtttgggtggctcaaggtgtctccaagcccccaccatcctggagacagccacattctcctaaacgccaccctcactaagtctccctgggcttggggagtggcacgatggcggcaggcctggccacgtggctgccttttgctcgggcagcagcagtgggctggctgcccctggcccagcaacccctgcccccggcaccgggggtgaaggcatctcgaggagatgaggttctggtggtgaacgtgagcggacggcgctttgagacttggaagaatacgctggaccgctacccagacaccttgctgggcagctcggagaaggaattcttctacgatgctgactcaggcgagtacttcttcgatcgcgaccctgacatgttccgccatgtgctgaacttctaccgaacggggcggctgcattgcccacggcaggagtgcatccaggccttcgacgaagagctggctttctacggcctggttcccgagctagtcggtgactgctgccttgaagagtatcgggaccgaaagaaggagaatgccgagcgcctggcagaggatgaggaggcagagcaggccggggacggcccagccctgccagcaggcagctccctgcggcagcggctctggcgggccttcgagaatccacacacgagcaccgcagccctcgttttctactatgtgaccggcttcttcatcgccgtgtcggtcatcgccaatgtggtggagaccatcccatgccgcggctctgcacgcaggtcctcaagggagcagccctgtggcgaacgcttcccacaggcctttttctgcatggacacagcctgtgtactcatattcacaggtgaatacctcctgcggctgtttgccgcccccagccgttgccgcttcctgcggagtgtcatgagcctcatcgacgtggtggccatcctgccctactacattgggcttttggtgcccaagaacgacgatgtctctggcgcctttgtcaccctgcgtgtgttccgggtgtttcgcatcttcaagttctccaggcactcacagggcttgaggattctgggctacacactcaagagctgtgcctctgagctgggctttctcctcttttccctaaccatggccatcatcatctttgccactgtcatgttttatgctgagaagggcacaaacaagaccaactttacaaacatccctgcggccttctggtataccattgtcaccatgaccacgcttggctacggagacatggtgcccagcaccattgctggcaagattttcgggtccatctgctcactcagtggcgtcttggtcattgccctgcctgtgccaatcattgtgtccaactttagccgcatctaccaccagaaccagcgggctgacaagcgccgagcacagcagaaggtgcgcttggcaaggatccgattggcaaagagtggtaccaccaatgccttcctgcagtacaagcagaatgggggccttgaggacagcggcagtggcgaggaacaggctctttgtgtcaggaaccgttctgcctttgaacagcaacatcaccacttgctgcactgtctagagaagacaacgtgccatgagttcacagatgagctcaccttcagtgaagccctgggagccgtctcgccgggtggccgcaccagccgtagcacctctgtgtcttcccagccagtgggacccggaagcctgctgtcttcttgctgccctcgcagggccaagcgccgcgccatccgccttgccaactccactgcctcagtcagccgtggcagcatgcaggagctggacatgctggcagggctgcgcaggagccatgcccctcagagccgctccagcctcaatgccaagccccatgacagccttgacctgaactgcgacagccgggacttcgtagctgccattatcagcatccctacccctcctgccaacaccccagatgagagccaaccttcctcccctggcggcggtggcagggccggcagcaccctcaggaactccagcctgggtaccccttgcctcttccccgagactgtcaagatctcatccctgtgagggtaggcctgctgattcagagggtcctcttcatttttgggaactcctttccaaagccatatttttgggaggcagagaggggcaggcttgggcaccccttctgccccccccactgagaactatgcaatggagtttcatgaaatggtccacatagtggggaagtagccaggaaatgagaaacttcctcccaccccagacatttttcctggtgggagctgaagcactgggcttccacaggcccctggcctccttgccctagcacactgggactggccccactctcccagctggactcctgcatgctcctccccttgggctctcagatgaaggcaaagctttgatccgacatctgagctctagcctaagaaggagagttgagatttcctcctccctctggctgggatatggagctttggaggttcagagaagagaaccctcacctctgatctggcctctacgagaggtcctcatctccatctggcccaacaattcccagattctgaagcttggaatgcaaacacaggcttcatgggctgtggcctctgcagcgacctgccatccccaggccttgcctgaggggtcaggctgcctctcccaacacacactcagatagcacaaattctaccatccccttcccctggctgctggaaatggaccccgcaaccctgtcctctgctgggcccccagcaaactctagcaatagcagctgctgccgtgtcattatgcaaagcctctgaccagtttgctgcagcatttacatctgccctaatcagaggggccg

SEQ ID NO: 390 - DNA, 372 bp, Homo Sapiens
  misc_feature (209)..(209): n is a, c, g, or t
  misc_feature (236)..(236): n is a, c, g, or t
  misc_feature (257)..(257): n is a, c, g, or t
  misc_feature (283)..(283): n is a, c, g, or t
  misc_feature (304)..(304): n is a, c, g, or t
  misc_feature (318)..(318): n is a, c, g, or t
  misc_feature (352)..(352): n is a, c, g, or t
  misc_feature (355)..(355): n is a, c, g, or t
  misc_feature (360)..(360): n is a, c, g, or t
  misc_feature (367)..(367): n is a, c, g, or t
ccacgcattttccaggataactgtgactccaggcccgcaatggatgccctgcaactagcaaattcggcttttgcgtctgatctgttcaaacaactatgtgaaaaggagccactgggcaatgtcctcttctctccaatctgtctctccacctctctgtcacttgctcaagtgggtgctaaaggtgacactgcaaatgaaattggacaggntcttcattttgaaaatgtcaaagatgnaccctttggatttcaaacagnaacatcggattgtaaacaaacttagntccttttactcactgaaactnatcaagcggctctncgtagacaaatctctcgaatctttctacagagtntantcagntctacgnagaga

SEQ ID NO: 391 - DNA, 576 bp, Homo Sapiens
  misc_feature (565)..(565): n is a, c, g, or t
tttttttttttttttttactgtcaacgtattttcttgtgccacctgtgtatctgaggctgaaaggtctgtaacgggctcagcagagagtttagctgttctgagagacgccaaaaagtcttccagagctttgagagtatcttcactcctctgcaccctgtggttcattccttcaaattgtgttttgtatttcagtataatattctgcattgcgtgtagatcaaatgggtgtaactcctttaatacaaagttgcctggctcttctaagcggttacatatttcaatctgttttgctatggaatcttggatattccttaggtgttgatagatgcgatcagcatcaatgagatgaaatccctggatggccattttatggagaggcaggtccgagccacagagaagaagtgatgccttctctacaggtaacacaagccgcagtgctgtctctaaagattccattctggtattaagagtcatctgaagctctctttctctttcctttagtgtgtctctttccttaattacaaaaggcttttttatgtcattcacatgattttctaacttcantgaaataattt

SEQ ID NO: 392 - DNA, 394 bp, Homo Sapiens
tttttttttttttttttaccaatcagcagcatgatgaaaacagcattccaccactgaatgccacaatctgcaccatccataggcgtcttcggaggtgccgggagcagtggctgatgggaggtgtccatgcagtaactttcatgtagaaagatttctgactgcactccacgctcaatatcctggtcaatccccttaaagaagcccatcagttggccggcctgggcaccggtgcccgcgcctgctctgtctgcctctggcagttccacggtcactgtggtctcggaagacgggctcagaaggggtttcagttctttgtgggtctccatcaggatcccatggtttctcactggaatcttaacagatttcaaagcatataagtcttgttctctgatga

SEQ ID NO: 393 - DNA, 1544 bp, Homo Sapiens
gtgcgcgtgcgcttgagagcgtcatcgcccccgactgtggagaagtgtccggggtagccccgttacaggaatgtgtttctgatcatctgaatcttaatcatgtccaactgcctgcaaaatttcctgaaaattacaagcactcgtcttctatgttcaagattatgccaacagttaagaagtaaaaggaagtttttcggaactgtgccaatatccagattgcataggcgagttgtcattacaggcattggcttagtgactcctcttggtgttggaactcacctggtttgggatcgtcttatcggaggagagagtggaattgtttcactggttggtgaagagtataagagtatcccttgcagtgttgctgcttatgtgccaagaggtagtgatgaaggtcagttcaatgaacaaaactttgtgtccaaatcagatatcaagtccatgtcttctcccaccatcatggccattggggctgcagaattagccatgaaggattctggctggcatcctcagtcagaagctgatcaagtggctactggtgttgcaattggcatgggaatgattcctcttgaagttgtttctgaaactgctttgaattttcagacaaaaggttacaataaagttagcccattttttgtccctaagattctggtcaatatggcagcaggccaggtcagcattcgatataaactcaagggcccaaatcatgcagtatccacagcctgtaccacaggagctcatgctgtgggagactcatttagatttatagcccatggtgatgctgatgtgatggtggctggaggtacagattcttgtattagccctttatctcttgctgggttttccagagcccgggctctgagcacaaactcagatcccaagttggcatgtcgaccatttcatccaaagagagatggttttgtaatgggagaaggtgcagctgtgctggtgctggaagaatatgaacatgctgttcaaagaagagcccggatctatgcagaagttttgggctatggactctcaggtgatgctggtcacataactgcccctgatcctgaaggagaaggtgccttaaggtgtatggctgctgctttaaaagatgcaggtgtgcagcctgaggagatatcctatatcaatgcacatgctacttccacaccattgggagatgctgctgaaaacaaagctatcaaacatctcttcaaagaccatgcatatgcccttgcagtttcctcaactaagggagcaacaggacatctgctgggagctgcaggggcagtcgaggcagcttttaccacattagcttgttattatcaaaaactaccacctactttaaacctggattgttcggaaccagaatttgatctcaactatgttccactaaaggcacaggaatggaaaactgagaaaagatttattggcctcaccaattcctttggttttggtggtactaatgcaacactttgtattgctggactgtagaacatataatttgtaattaaatactgatttttaaatgctaaaaaaaaaaaaaaaaaaaaaaaaaa

SEQ ID NO: 394 - DNA, 469 bp, Homo Sapiens
  misc_feature (17)..(17): n is a, c, g, or t
  misc_feature (156)..(156): n is a, c, g, or t
  misc_feature (158)..(158): n is a, c, g, or t
  misc_feature (435)..(435): n is a, c, g, or t
ggcgggcgtcgggtacncgcacacgttacatcttcttcctttcgcggggtcctccgtagttctggcacgagccaggcgtactgacaggtggaccagcggactggtggagatggcgacgctctctctgaccgtgaattcaggagaccctccgctagncntttgctggcagtagaacacgtgaaagacgatgtcagcatttccgttgaagaagggaaagagaatattcttcatgtttctgaaaatgtgatattcacagatgtgaattctatacttcgctacttggctagagttgcaactacaggctgggttatatggctctaatctgatggaacatactgagattgatcactgggttggagttcagtgctacaaaattatcttcatgtgattcctttacttctacaattaatgaactcaatcattgcctgtctctgngaacatacttagttggaaactccttgagtttagc

SEQ ID NO: 395 - DNA, 387 bp, Homo Sapiens
gcacgaggcaggatggagatccctgtgcctgtgcagccgtcttggctgcgccgcgcctcggccccgttgcccggactttcggcgcccggacgcctctttgaccagcgcttcggcgaggggctgctggaggccgagctggctgcgctctgccccaccacgctcgccccctactacctgcgcgcacccagcgtggcgctgcccgtcgcccaggtgccgacggaccccggccacttttcggtgctgctagacgtgaagcacttctcgccggaggaaattgctgtcaaggtggtgggcgaacacgtggaggtgcacgcgcgccacgaggagcgcccggatgagcacggattcgtcgcgcgcgagttccaccgtcgctaccgcctgccgcct

SEQ ID NO: 396 - DNA, 6270 bp, Homo Sapiens
gccctgcttccccttgcacctgcgccgggcggccatggacttgtacagcaccccggccgctgcgctggacaggttcgtggccagaaggctgcagccgcggaaggagttcgtagagaaggcgcggcgcgctctgggcgccctggccgctgccctgagggagcgcgggggccgcctcggtgctgctgccccgcgggtgctgaaaactgtcaagggaggctcctcgggccggggcacagctctcaagggtggctgtgattctgaacttgtcatcttcctcgactgcttcaagagctatgtggaccagagggcccgccgtgcagagatcctcagtgagatgcgggcatcgctggaatcctggtggcagaacccagtccctggtctgagactcacgtttcctgagcagagcgtgcctggggccctgcagttccgcctgacatccgtagatcttgaggactggatggatgttagcctggtgcctgccttcaatgtcctgggtcaggccggctccgcggtcaaacccaagccacaagtctactctaccctcctcaacagtggctgccaagggggcgagcatgcggcctgcttcacagagctgcggaggaactttgtgaacattcgcccagccaagttgaagaacctaatcttgctggtgaagcactggtaccaccaggtgtgcctacaggggttgtggaaggagacgctgcccccggtctatgccctggaattgctgaccatcttcgcctgggagcagggctgtaagaaggatgctttcagcctaggcgaaggcctccgaactgtcctgggcctgatccaacagcatcagcacctgtgtgttttctggactgtcaactatggcttcgaggaccctgcagttgggcagttcttgcagcggcacgttaagagacccaggcctgtgatcctggacccagctgaccccacatgggacctggggaatggggcagcctggcactgggatttgcatgcccaggaggcagcatcctgctatgaccacccatgctttctgagggggatgggggacccagtgcagtcttggaaggggccgggccttccacgtgctggatgctcaggtttgggccaccccatccagctagaccctaaccagaagacccctgaaaacagcaagagcctcaatgctgtgtacccaagagcagggagcaaacctccctcatgcccagctcctggccccactgcggagccagcatcgtacccctctgtgccgggaatggccttggacctgtctcagatccccaccaaggagctggaccgcttcatccaggaccacctgaagccgagcccccagttccaggagcaggtgaaaaaggccatcgacatcatcttgcgctgcctccatgagaactgtgttcacaaggcctcaagagtcagtaaagggggctcatttggccggggcacagacctaagggatggctgtgatgttgaactcatcatcttcctcaactgcttcacggactacaaggaccaggggccccgccgcgcagagatccttgatgagatgcgagcgcacgtagaatcctggtggcaggaccaggtgcccagcctgagccttcagtttcctgagcagaatgtgcctgaggctctgcagttccagctggtgtccacagccctgaagagctggacggatgttagcctgctgcctgccttcgatgctgtggggcagctcagttctggcaccaaaccaaatccccaggtctactcgaggctcctcaccagtggctgccaggagggcgagcataaggcctgcttcgcagagctgcggaggaacttcatgaacattcgccctgtcaagctgaagaacctgattctgctggtgaagcactggtaccgccaggttgcggctcagaacaaaggaaaaggaccagcccctgcctctctgcccccagcctatgccctggagctcctcaccatctttgcctgggagcagggctgcaggcaggattgtttcaacatggcccaaggcttccggacggtgctggggctcgtgcaacagcatcagcagctctgtgtctactggacggtcaactatagcactgaggacccagccatgagaatgcaccttcttggccagcttcgaaaacccagacccctggtcctggaccccgctgatcccacctggaacgtgggccacggtagctgggagctgttggcccaggaagcagcagcgctggggatgcaggcctgctttctgagtagagacgggacatctgtgcagccctgggatgtgatgccagccctcctttaccaaaccccagctggggaccttgacaagttcatcagtgaatttctccagcccaaccgccagttcctggcccaggtgaacaaggccgttgataccatctgttcatttttgaaggaaaactgcttccggaattctcccatcaaagtgatcaaggtggtcaagggtggctcttcagccaaaggcacagctctgcgaggccgctcagatgccgacctcgtggtgttcctcagctgcttcagccagttcactgagcagggcaacaagcgggccgagatcatctccgagatccgagcccagctggaggcatgtcaacaggagcggcagttcgaggtcaagtttgaagtctccaaatgggagaatccccgcgtgctgagcttctcactgacatcccagacgatgctggaccagagtgtggactttgatgtgctgccagcctttgacgccctaggccagctggtctctggctccaggcccagctctcaagtctacgtcgacctcatccacagctacagcaatgcgggcgagtactccacctgcttcacagagctacaacgggacttcatcatctctcgccctaccaagctgaagagcctgatccggctggtgaagcactggtaccagcagtgtaccaagatctccaaggggagaggctccctacccccacagcacgggctggaactcctgactgtgtatgcctgggagcagggcgggaaggactcccagttcaacatggctgagggcttccgcacggtcctggagctggtcacccagtaccgccagctctgtatctactggaccatcaactacaacgccaaggacaagactgttggagacttcctgaaacagcagcttcagaagcccaggcctatcatcctggatccggctgacccgacaggcaacctgggccacaatgcccgctgggacctgctggccaaggaagctgcagcctgcacatctgccctgtgctgcatgggacggaatggcatccccatccagccatggccagtgaaggctgctgtgtgaagttgagaaaatcagcggtcctactggatgaagagaagatggacaccagccctcagcatgaggaaattcagggtcccctaccagatgagagagattgtgtacatgtgtgtgtgagcacatgtgtgcatgtgtgtgcacacgtgtgcatgtgtgtgttttagtgaatctgctctcccagctcacacactcccctgcctcccatggcttacacactaggatccagactccatggtttgacaccagcctgcgtttgcagcttctctgtcacttccatgactctatcctcataccaccactgctgcttcccacccagctgagaatgccccctcctccctgactcctctctgcccatgcaaattagctcacatctttcctcctgctgcaatccatcccttcctcccattggcctctccttgccaaatctaaatactttatatagggatggcagagagttcccatctcatctgtcagccacagtcatttggtactggctacctggagccttatcttctgaagggttttaaagaatggccaattagctgagaagaattatctaatcaattagtgatgtctgccatggatgcagtagaggaaagtggtggtacaagtgccatgattgattagcaatgtctgcactggatatggaaaaaagaaggtgcttgcaggtttacagtgtatatgtgggctattgaagagccctctgagctcggttgctagcaggagagcatgcccatattggcttactttgtctgccacagacacagacagagggagttgggacatgcatgctatggggaccctcttgttggacacctaattggatgcctcttcatgagaggcctccttttcttcaccttttatgctgcactcctcccctagtttacacatcttgatgctgtggctcagtttgccttcctgaatttttattgggtccctgttttctctcctaacatgctgagattctgcatccccacagcctaaactgagccagtggccaaacaaccgtgctcagcctgtttctctctgccctctagagcaaggcccaccaggtccatccaggaggctctcctgacctcaagtccaacaacagtgtccacactagtcaaggttcagcccagaaaacagaaagcactctaggaatcttaggcagaaagggattttatctaaatcactggaaaggctggaggagcagaaggcagaggccaccactggactattggtttcaatattagaccactgtagccgaatcagaggccagagagcagccactgctactgctaatgccaccactacccctgccatcactgccccacatggacaaaactggagtcgagacctaggttagattcctgcaaccacaaacatccatcagggatggccagctgccagagctgcgggaagacggatcccacctccctttcttagcagaatctaaattacagccagacctctggctgcagaggagtctgagacatgtatgattgaatgggtgccaagtgccagggggcggagtccccagcagatgcatcctggccatctgttgcgtggatgagggagtgggtctatctcagaggaaggaacaggaaacaaagaaaggaagccactgaacatcccttctctgctccacaggagtgtcttagacagcctgactctccacaaaccactgttaaaacttacctgctaggaatgctagattgaatgggatgggaagagccttccctcattattgtcattcttggagagaggtgagcaaccaagggaagctcctctgattcacctagaacctgttctctgccgtctttggctcagcctacagagactagagtaggtgaagggacagaggacagggcttctaatacctgtgccatattgacagcctccatccctgtcccccatcttggtgctgaaccaacgctaagggcaccttcttagactcacctcatcgatactgcctggtaatccaaagctagaactctcaggaccccaaactccacctcttggattggccctggctgctgccacacacatatccaagagctcagggccagttctggtgggcagcagagacctgctctgccaagttgtccagcagcagagtggccctggcctgggcatcacaagccagtgatgctcctgggaagaccaggtggcaggtcgcagttgggtaccttccattcccaccacacagactctgggcctccccgcaaaatggctccagaattagagtaattatgagatggtgggaaccagagcaactcaggtgcatgatacaaggagaggttgtcatctgggtagggcagagaggagggcttgctcatctgaacaggggtgtatttcattccaggccctcagtctttggcaatggccaccctggtgttggcatattggccccactgtaacttttgggggcttcccggtctagccacaccctcggatggaaagacttgactgcataaagatgtcagttctccctgagttgattgataggcttaatggtcaccctaaaaacacccacatatgcttttcgatggaaccagataagttgacgctaaagttcttatggaaaaatacacacgcaatagctaggaaaacacagggaaagaagagttctgagcagggcctagtcttagccaatattaaaacatactatgaagcctctgatacttaaacagcatggcgctggtacgtaaatagaccaatgcagttaggtggctctttccaagactctggggaaaaaagtagtaaaaagctaaatgcaatcaatcagcaattgaaagctaagtgagagagccagagggcctccttggtggtaaaagagggttgcatttcttgcagccagaaggcagagaaagtgaagaccaagtccagaactgaatcctaagaaatgcaggactgcaaagaaattggtgtgtgtgtgtgtgtgtgtgtgtgtgtgtgtttaatttttaaaaagtttttattcggaatccgcg

SEQ ID NO: 397 - DNA, 423 bp, Homo Sapiens
tgcattactggctggggaagacccgcatccttcacgcaggcagagtcgccctgctcccttgtgcctcacttgggaaaagccaacccggctcacagcggcagagcccacggtcctttgataaacatctgggaagggagaggcccggtccccagcacaggcacctcactcaggagagcggagccttgccccctcgtccgtcccgtcccctgtgctgctgtctgcgccccgaggtggcactgagctggagccagcacccccccagcagccaccgtacaaaaccataggaaggtgtcccagggccgtgcagcagatcaggacctcggagctgtggtgctttgttggatcacttcacacagcggtcctgggagagtcactgggtttatacctgacccttgtgagccagaggggacagtgaaccatttt

SEQ ID NO: 398 - DNA, 355 bp, Homo Sapiens
  misc_feature (226)..(226): n is a, c, g, or t
  misc_feature (249)..(249): n is a, c, g, or t
  misc_feature (277)..(277): n is a, c, g, or t
  misc_feature (296)..(296): n is a, c, g, or t
accaaaacaaaggagcggcggccgggagcggacttaccttaccttctctgccttcggcgcgcttctcagccgggccgccgacccaaaggagccgtccgactatgtctaacatggagaaacacctgttcaacctgaagttcgcggccaaagaactgagtaggagtgccaaaaaatgcgataaggaggaaaaggccgaaaaggccaaaattaaaaaggccattcagangggcaacatggaagttgcgaggntacacgccgaaaatgccatccgccagangaaccaggcggtgaatttnttgagaatgagtgcgcgagtcgatgcagtggctgccagggtccagacggcggtgacgat

SEQ ID NO: 399 - DNA, 549 bp, Homo Sapiens
gcacatcctgcaactatctggtaatggctttaccacctgcaaaactgaccctaggttgttgctacccgatatggtttggctgcgtccccacccaaatttcatcttgaattgtagttcccataatccccatgtgtcgtgggagggacccggtagggaggtaatcgaatcatgggggcaggtttttcccatactgttctcgtgatagtgaatacatctcactaaatctgatggttttataaagggcagtttccctgcacgtgctctcttgcctgctgccatggaagacatacctttttgctccttgccttccaccatgattctgaggcctctccagccttgtgggaactgtgagtacattaaacctccttttctttataaattacccagtttccagtatttcttcatagcagtatgaaaagtaactaatacactacccgagacatcttaggagatttgtaatagctgtaatgccaggtccaccatatttttagcataaagcaaatgtttacgcgtgatatgaactgacgggctttctttcagctggagcat

SEQ ID NO: 400 - DNA, 385 bp, Homo Sapiens
tttttttttttttttttccttttccagcttcttatttttgaccagaatagtaggtttactttcaggagttttcttgttgaggactttagccatagcatctgcccagcccatattagtcccaacacttgattctccatcattttcattttctttgtcacagggctcagcatcaccctcactgtcagcttctattgcgtcatcatcagaataaaagtggtccttttccgatccacagcttccttcactatcagaagtgtctgtggcctcgtcttccagcaccgacgctacggctccagttaccattttcatcttcttctttggggtctttttcaggttttcttcctcactcacacgtgagtccggagcggcggctgccctcgtgccg

SEQ ID NO: 401 - DNA, 362 bp, Homo Sapiens
ctgccacgaagtgctgggattacaggcatgagccaccacgcctgacctctttcttcctttttttggaacatttccttattttctggcacaaaatcttccagactcatcttgtaccttctctgttccagttttagaactggccatttctcttataaatgaaaagctgagtgttcaggtgtgctcatggctcttagggtgctgttgcttctaggtcttttgagagcatagagccaggaagcatacacacatttttggctcctgactttttgctctttcccaggttattgagtttgccccttgctttccattcctcgtcacctcatcacagtccataccaccatcactttacacttcgtgggcag

SEQ ID NO: 402 - DNA, 270 bp, Homo Sapiens
  misc_feature (13)..(13): n is a, c, g, or t
  misc_feature (76)..(76): n is a, c, g, or t
  misc_feature (78)..(78): n is a, c, g, or t
  misc_feature (80)..(80): n is a, c, g, or t
  misc_feature (208)..(208): n is a, c, g, or t
  misc_feature (235)..(235): n is a, c, g, or t
  misc_feature (266)..(266): n is a, c, g, or t
agagagagagagngagagagagagagagagagagagagagagagagagagagagagagagagagagagagagaganananagagagagagagagcgagtctgggtctcagccccagcgaacagccatttcactgagtcttcaagctttcaggctatcttctagtcaagatgagtgataagccagacttgtcggaagtggagaagtttnacaggtccaaacttgaggaaacttatncctggaggaaaaaattattctccccctcaanggaa

SEQ ID NO: 403 - DNA, 782 bp, Homo Sapiens
gggctccctgcctcgggctctcaccctcctctcctgcagctccagctttgtgctctgcctctgaggagaccatggcccagtatctgagtaccctgctgctcctgctggccaccctagctgtggccctggcctggagccccaaggaggaggataggataatcccgggtggcatctataacgcagacctcaatgatgagtgggtacagcgtgcccttcacttcgccatcagcgagtataacaaggccaccaaagatgactactacagacgtccgctgcgggtactaagagccaggcaacagaccgttgggggggtgaattacttcttcgacgtagaggtgggccgcaccatatgtaccaagtcccagcccaacttggacacctgtgccttccatgaacagccagaactgcagaagaaacagttgtgctctttcgagatctacgaagttccctgggagaacagaaggtccctggtgaaatccaggtgtcaagaatcctagggatctgtgccaggccattcgcaccagccaccacccactcccaccccctgtagtgctcccacccctggactggtggcccccaccctgcgggaggcctccccatgtgcctgcgccaagagacagacagagaaggctgcaggagtcctttgttgctcagcagggcgctctgccctccctccttccttcttgcttctaatagccctggtacatggtacacacccccccacctcctgcaattaaacagtagcatcgcctccctctgaaaaaaaaaaaaaaaaaaaaaaa

SEQ ID NO: 404 - DNA, 495 bp, Homo Sapiens
cacgaggcgtggaagcgctgcgcagcgcattgatgcggcagccgatcaggtagagctcgccatcacggatcagcacgtagccgtcggtcagctgcacctggccggcgcggatcgccttgatctcccagccggacagcacgacgccggcctcgaactgttcctcgatgtggtagtcgtagcgggcgcggcggttctcggcgatagacatggacggaaatgtgggggctcatgcccttcttacaatcccggcattctatgaagcaggtcaagaagtccgtgctgctctggcacacgccgcacgagatgtatgagttggtgacccaggtggagcgctatccggagttcctgccgtggtgcaacaaggtcgaggtgctggcccgtgaaggcgattcggtcaccgcgcggctgcacctggcctatgccggcgtcaagcacgccttcaccacgcgcaaccgcaacgaggccgatcgcagcgtgcgcatggagctggtcgac

SEQ ID NO: 405 - DNA, 456 bp, Homo Sapiens
cacgaggtataatggcgttgctgccgataaccaaggcagcctacggcagggcatgccggaagtaacgcctgtggagatacgagcagcggttgcgcactcggcccaggaacccaccgaagcgactcattccggctcgatgtcggggtgagcgccgtaggaatcccccgactttaggcgggggaggatgtcaacgcgttggtgacgtacagccgctcgcgcggccagccgagcgcctccagggcgcgcgcgagcaactgcccggccgggccgacgaaggggcggccttgccggtcctcctggtcgcccggttgctcgcccaccagcatcagcggcgcgtgcaggtcgccctcgccccagaccgtctgcgtcgcatggaagcccagcgggcactcccggcagccggcagcctgtgcgcgcagcgcctgccagcgggcctcggggtccgtcagggtgtcg

SEQ ID NO: 406 - DNA, 473 bp, Homo Sapiens
cacgaggctggtccctgaactgttcatgaccgacttcccggccaggctcttcctggagaacagcaagctggagcacagcgaggacgagggcagcgtcctgggccagggcggcagtggcaccgtcatctaccgggcccggtaccagggccagcctgtggccgtcaagcgcttccacatcaaaaaattcaagaactttgctaacgtaccggcagacaccatgctgaggcacctgcgggccaccgatgccatgaagaacttctccgagttccggcaggaggccagcatgctgcacgcgctgcagcacccctgcatcgtggcgctcatcggcatcagcatccacccgctctgcttcgccctggagctcgcgccgctcagcagcctcaacaccgtgctgtccgagaacgccagagattcttcctttatacccctgggacacatgctcacccaaaaaatagcctaccagatcgcctcgg

SEQ ID NO: 407 - DNA, 160 bp, Homo Sapiens
  misc_feature (69)..(69): n is a, c, g, or t
gatctgaattctttatgtatatttgtagctatatttcatacaaagtgctttaagtgtggagagtcaatnaaacacctttactcttagaaatacggattcggcagccttcagtgaatattggtttctctttggtatgtcaataaaagtttatccgtatgtc

SEQ ID NO: 408 - DNA, 290 bp, Homo Sapiens
cctggagctaccaggctcctcagtcatcagggtccctcccaacactaaggctttcctaggcaggagctgggctgagccacccggggggcagagcctgaagagaaactgactgggctttcggggtcggggcagagggaaccccacggacatggatcccacactggaggaccccaccacgcccaaatgcaagatgagaagatgctccagctgcagtccaaagcccaacacccccaaatgtgccatgtgtgatggggacagcttcccctttgcctggtacaggtggagaagcc

SEQ ID NO: 409 - DNA, 559 bp, Homo Sapiens
cacgagggggatgtcatccctaaacattacgacagcgctcgaaatctttcgttggagaatagcccagaaggcctcatcgcgcattgggtggcggtctcttagcacctcaagaatggtgaagtctttggtggtcagttggcagctatcggtagtggacatgaaatgtctccagccggaccagtgaaaggcgatccggcaacaagaattgatcgggtggtatggaaagatcccctgcgccggaccggcccggcccaggggtcagactcccgcgatcagactgcctgcgtgattgaggagacggacggagacgcccatgtctagaggctcgccgcgaccgctggagtggcaggcgccaggcggccggagctattgtcttgcggggcgggatggctcacgccaagcaccaacagttcgtgcctgcgcccgtctcgggcggtccacatgatcgactgtccagccgagaggccgatcagggcggtgccgatcggggtcaggattgaaaccttgcctgcagaaatgtcggcttcacctggataaaccagcgtgaccgttttgcgat

SEQ ID NO: 410 - DNA, 519 bp, Homo Sapiens
cacgagggagcacaggatcaaaccctgtttctgggtcgggcaccacggccacccgcgcaaaatacgatgtcccgaacccgtgcctccgtggttggcggctctcgttgcggtctgtgggctggtactggaaggccggccttccctcccacagcccctcccaggtgacgaagcccacactgtatggcgggatgtagcccccctgcacccgcacccccgcgtcccctcggcaatccgtcggctcgtacgtggtgcggtgtccgttccccggaggactgttgctactcccactaccatccccggatacccacgagggccggaagacggggtcagccggatcatcactgatcacggcataccagtcattcgccgacaagaacccgtcaaccagatgccaaccatccggaatggtcaggacatgcaagaaattcaggaaggaaaattggcgcatctgttcctcataccaggcattgagcgccatctggctgctgtacaccgaatccccataggcggtgtacggcc

SEQ ID NO: 411 - DNA, 430 bp, Homo Sapiens
cacgaggccgacgacacccacgcgcaggacgcggtgatctatgcgctcgggctgatcggcaaccagtaccgattcggcggtcgcaacccggacagcggggtggactgcagtggcatggtgagctggatcttcgaacaggtggcgggcatacgcctgccgcacaacgcggcgcagatcgcccgcctggcgcgaccggtcgatcgcgcgtcgctgcagccgggcgatctggtgttcttcaacaccagcggcaagccgcattcacatatgggcatctacgccggcgagggacgcttcatccacgcaccgagcacgcgcggcaagtatgtgcgcaccgatgcgctggacagcggctggttcgccgcgcgcatcagcggactgcgcacgctgcgtcgcgacgtctgaaggaaatcctgatggggctcgcctgacg

SEQ ID NO: 412 - DNA, 2152 bp, Homo Sapiens
ggcacgaggcctgcgcccacaccctctcctgtccagccctcgcccgcctgggcagggcccggcgccgtccgtggatgagccacagaacctcttccaccttccgagcggagagaagtttccattcctcttcttcttcctcctcctcttccacctcctcctcggcctcccgtgctctcccggcccaggacccgcccatggagaaggccctgagcatgttttccgatgactttggcagcttcatgcggccccactcggagcccctggccttcccagcccgccccggtggggcaggcaacatcaagaccctaggagacgcctatgagtttgcggtggacgtgagagacttctcacctgaagacatcattgtcaccacctccaacaaccacatcgaggtgcgggctgagaagctggcggctgacggcactgtcatgaacaccttcgctcacaagtgccagctgccggaggacgtggacccgacgtcggtgacctcggctctgcgggaggacggcagcctcactatccgggcacggcgtcacccgcatacagaacacgtccagcagaccttccggacggagatcaaaatctgagtgcctctcccttccctttccctgtccccccgccccacgcctgccagcaaagcctcgctaaccccattacaacagctccaggacatctcagcccaggttctagcccccacgcacccagaccccaggtggaccatcctcccaaactagggccctccactctatccagggcaggccagggactccctggcctgacacatgatgcccagatttcagatttggcctccgtcacttaatccagagtacaggggctggggtcagggaaggaagatctaaagaacccactgtgggtcaggggaatgggaccagcaggacatatgggcaagctctgcaggacagacagacagacaaaccctctgatctatgaagtctctgcagggcaaggggaccagggacctggaaccctcttggccaaggggagtgggagggacagagggaaggtcacaggcaagggtgcctatctaagtggaactaattgcccgagggctcagcaaggccaagaggagacagccgtgacggtaaacttcccctctaccagcctccaagccccacgccagcgagcaggctgcctgcccaccccgtgcccccagccagctggctgtgccagggcagagccatgccacatctgtatatagatggggtttttccaatacagctggttcgtgataaactgcatgaaactcctgccgtcctgcgcctgctggggcctccaggcaaggccaagtggggttgggggtggggctggtccttctccctcccacaggcctgtgttcttggggctgctcccatgcagacaggatcacctaacagagatggaagccagggcatggatggggctttgggtcctcgaggttggaccccagcttcttgccaccttcccctccgggcagtcagctctccatccatccccctctttaatctatgaatctataggctcggtgtgtgtaacacacacacccctatcgttgtccttcaaatactcagcattaccattggttgaggccaaattcagagctttctcaaatcagatttacaatctccattttcattaacggggaaacatccccgagccactgagtgctgtgctttgtcactgaaggttagatctgaacccagggtgtcaacagctgctctcaactccccacctctgggcactgaggagtatttcccctcattctacctctctaaggctatgcaccctccccacgtcttccagctgggggatggggggagtcataggaaaagcccccatctcccatctgggatagggaccttccatcagccttaaccctgggaaatgcctgctgcccccaatgactcttggtttcgtctcccacatacagaagcagggtggaggggaagggtgggtctcagttagcaggggtccccagggcaagtcagcctcctccctccatgcctctctggtcagtgtgccttagggtggcctctcactcccaccactctgggccccttgggggaggactggggagggggccgtgggagagccctgacgctggaacctgtatacacaataaaggacagtctcacagaaaaaaaaaaaaaaaaaa

SEQ ID NO: 413 - DNA, 586 bp, Homo Sapiens
agcgcgccagggcgagggcaccgccgccggtcgggcgcgctgggcctgcccggaatcccgccgcctgcgccccgcgccccgcgccctgcgggccatgggagccggccgccggcagggacgacgcctgtgagacccgcgagcggcctcggggaccatggggagcgatcgggcccgcaagggcggagggggcccgaaggacttcggcgcgggactcaagtacaactcccggcacgagaaagtgaatggcttggaggaaggcgtggagttcctgccagtcaacaacgtcaagaaggtggaaaagcatggcccggggcgctgggtggtgctggcagccgtgctgatcggcctcctcttggtcttgctggggatcggcttcctggtgtggcatttgcagtaccgggacgtgcgtgtccagaaggtcttcaatggctacatgaggatcacaaatgagaattttgtggatgcctacgagaactccaactccactgagtatgtaagcctggccagcaaggtgaaagacgcgctgaagctgctgtacagcggagtcccattcctgggcctctaccacaaggagtcgggtgtgacg

SEQ ID NO: 414 - DNA, 390 bp, Homo Sapiens
ctgcatcatgaaccgatcttcatctgacaagttttccagaggcttcctttcccgctcgtagagccgaagcactttcacttcattctcagttggtaggaaccgcatcaagcattccacaaagtccacaggcagtgtcttcaagtcaaatacatgaatagctttacatatttcatcagcagtctttccagctttccttaaagttatggcaagatttttggccctgtttgcttctagtaatgtcacttttgttgatcccttctggggtatcttctgtttgcttgaagaaagaacaatggcaggtccttgggcttttgtcttgaatatttcctcaaaatcattcacattttaaacctccagaattcgctcattcatcaaattcattggaaaact

SEQ ID NO: 415 - DNA, 453 bp, Homo Sapiens
ggcacgaggcgcgaaacctggttgttgctgtagtggcggagaggatcgtggtactgctatggcggaatcatcggaatccttcaccatggcatccagcccggcccagcgtcggcgaggcaatgatcctctcacctccagccctggccgaagctcccggcgtactgatgccctcacctccagccctggccgtgaccttccaccatttgaggatgagtccgaggggctcctaggcacagaggggcccctggaggaagaagaggatggagaggagctcattggagatggcatggaaagggactaccgcgccatcccagagctggacgcctatgaggccgagggactggctctggatgatgaggacgtagaggagctgacggccagtcagagggaggcagcagagcgggccatgcggcagcgtgaccgggaggctggccggggcctgggccgcatgcg

SEQ ID NO: 416 - DNA, 232 bp, Homo Sapiens
tttttttttgagagcaaacgaaaaggttttagctttttaatttaagaaaagaggaatgtgatataatttcaatttgtgataagatgagatgttctcgatattgcagtttcaattggattatatcctaacgtgctttataaagtgtcaggccggctgccgacgaaggggtgtgtgtgattatctttattaataatccggtgggctggtgttttttctatccgtcttcatcagt

SEQ ID NO: 417 - DNA, 476 bp, Homo Sapiens
agaggccccatagatgacaggcccaggtgctttagttgggcaggacctgggagtcagtgaggaactcgccccgagaacagagaaaaggtaggcaaggagaggagatgctgatggcatctggaaacaagtcttagagatggtctgcacccagagggaataaggggagacatccccaactggaatgtgtcctggagcagctgcctgggaagaagtcctcgagtttcctcaaggtgggggacagaggtcaaggatgaggccgagctaaatggaagggcgacagtgaggcaggtgggctttaaggctgtggattcgtcatgctggcggctgcacaggcactttcaggttccttggggcttgtaggggatggggacttgtcagtggaaagacgggagggatgatgtttttggacttcagtacgggtgtgatgtcccaggaagtgggtgtggctcccctcctgtatgaaataagcagtaaag

SEQ ID NO: 418 - DNA, 407 bp, Homo Sapiens
  misc_feature (12)..(12): n is a, c, g, or t
  misc_feature (252)..(252): n is a, c, g, or t
  misc_feature (341)..(341): n is a, c, g, or t
  misc_feature (373)..(373): n is a, c, g, or t
  misc_feature (395)..(395): n is a, c, g, or t
gacgctggggtncgccgtggccttactgcacctacagcctcacccgcgacgctcacggcagctgcctgcacgcctccaccgccaatggttccatcctcgcaggcctctgagccagccccgcccactgccagggacgccgagggcctgaccaggggccccgaggctggagggccctcccctgtccccacctcagtgcctgcggggccctgagcctccccctgtgccagcagccccactccctcagggtccagncatgccccaccctggactgaagttctgcaaagtcctccgaggaccggaacacgtttctgcgacccggggctctggccagcactgtgttntgcgtttggtctcatacctgcgtcttaccttncatctgtgtccagcggccccgncttcagtccagg

SEQ ID NO: 419 - DNA, 445 bp, Homo Sapiens
  misc_feature (212)..(212): n is a, c, g, or t
  misc_feature (283)..(283): n is a, c, g, or t
  misc_feature (306)..(306): n is a, c, g, or t
  misc_feature (313)..(313): n is a, c, g, or t
  misc_feature (318)..(318): n is a, c, g, or t
  misc_feature (341)..(341): n is a, c, g, or t
  misc_feature (356)..(356): n is a, c, g, or t
  misc_feature (361)..(361): n is a, c, g, or t
  misc_feature (374)..(374): n is a, c, g, or t
  misc_feature (380)..(380): n is a, c, g, or t
  misc_feature (408)..(408): n is a, c, g, or t
  misc_feature (425)..(425): n is a, c, g, or t
tttttttttttttgattattcctatttctaatttttattgggaaattttaggaaaaaggatttcagaacagcaagttgaccattattttgatgattaaatttcgtttctatagattccattctaaccactaacttgcactttgtttttaacacaaacagtattttatatcaacatgcaaagccaaaaaaaacctgaatataaggcactagantttttcatcttagtcaaatgttcaaaaatagattattgcagacatgttgacatgcgatattttagctggantgccagcatcagttcatgaaatnttctggnatgantaacaacgtctcttttagcaggnacttgagccccactnaacantcacctacacagncagagngggaagggtgtgggtttctttcaatgtntccctgcccttcagggngatagcaggctttgggtgtg

SEQ ID NO: 420 - DNA, 473 bp, Homo Sapiens
tcagaataaccaacacaatattgaaggagtagaacatagttggaggactgacaatatccaagttttaagacttaccgtgaagctacagtaaccaagatgttgtggtattggtaaaagaaaagagaaataggtcaatggaacagaatattaaaagcccaaaaaatagatccaaataaatataggcaacttatatttgataaaggtgcaaaggcaatacgatggtcccaaataaaaaatataatgtatttggagatcagaatcaaggccagagtaaccgagtgtagcaagggaaggagatcagctacagaagagattagagaagtcaacagggtttagcgatgcaacatcccttaggctatgaaaggagatcaatgtttgtagcaggattttattttgagacactgactgaggtttctctcattctcctaccacctcacacagtcaggtaccctcaccatcctcaggaaaaaaag

SEQ ID NO: 421 - DNA, 629 bp, Homo Sapiens
  misc_feature (349)..(349): n is a, c, g, or t
tttagattcaaaatgacttcattctgtcataaattataaaatacaaaggtggctgttttaatgacaaaactcaaaacagtactaaaaggggtttgtgtcaatggacaaaagtcagtccctctaggtagggccccaaggagcatcacccaggttgaagggtggttttcctactgctgggccagaagtgctgtcctattggccttcatcttctccagccgcttggccaggtggctgttggtcatctccatctcctcaatcttgtccagtgctgttcgtaactctcgttgtagcttccgtttttctgctttcaattcatcttcaactttctcagcattctcagcagcagttntatatctcagaacctgtccctcaagccggctaatactttgctccaaggtagttatatcctgttctgcttttgaaagcttaaatttgtattcgctaatttgtctattggcatctctctgcatttcgatgaactgcaagtctgagccattctgcagtcctgcccagtcacccactgtgccatcattcctgggaggcattctgtcgtccttctctaactgaagcttcagttttctaatctgtgacagtaggtcctccctctctccagcaagtttcggagccct

SEQ ID NO: 422 - DNA, 805 bp, Homo Sapiens
cactccagcctgggcgacaggctcaaaaaaagaaaaaaaaaaagaacaccgatcatgtgcttctgggatctggtgactgttctctcccgggttttcctttcttttggggtgttttgaggagcatggcttagctgtgagacacacacagacactggtgtacttcagtgaagggcttaatatacagtttccaaacctgacgactcttcttctggtaatgggctgcccttttcctaacctgaggccgtcttagagaaaggggccagtctcctctaatggctcagatttcccatagttgggcttttggctggtgtctccggcctcaggcagtggtcatttctggggagcaggtggttgtagtccaggcccctccccagcagggtctgcccaggctccttcgagcccctttccccgcctcctctcagcctgtccggatgacagtgttcgcctccggtttagactgtacactcttcaggggataggggtgccgtcagttctatcaatcagctgggacacacacttgtatacggtgaaatgtttcctgtggggaaacctccgccttagacaaacgtaaccaaagtaacaatcgaggtcacatcatcataggcccggaattgcacagaagaggaaattggacccttagatttggcaccacagggtctgttaacccggcccggttcggcacacgtgaccccggatgactaaggagctgtagaaggccccaaaagcggattgggggcgaatcaattggcctgtggccacttctggcaaatcaagtgctgtggtgccccagtggttccaatgtatc

SEQ ID NO: 423 - DNA, 220 bp, Homo Sapiens
ccggggggacggagagcgaggatgagatcatagtagtagttccgagcccatagaacacgtgctcttctctctttcatcacttggtggtctttgtggtgatggcagcagcagactccaaggtgggtactgaggttgatggaatgcctctcttaggtggtaagggtggggacggttttgataacaatgtaccactgtttattgcttggccggtacatgcaag

SEQ ID NO: 424 - DNA, 354 bp, Homo Sapiens
acggtgaaagatatcacttcctcacccgtggacactcacttcttcacccgtggacactcagagctcccgtctctgtcagacacgtgtcacctctgctaacacacccaggcatctccgggaggacagggaactgtcatcttctccaagatggttctgctccacccaacccaggctttcctaaagccccaaactccacaccggaggcaacgcctgatgaagcaacgttcccgccacagcatccaccttaaccttccaaatgccactgctgtgaagaggagccatcgcagatcgccatggcgacagagcccttctgacccaggggatccactgctctcaggcaccgtccaaccgaca

SEQ ID NO: 425 - DNA, 350 bp, Homo Sapiens
gcctactactactactactactactaaattcgcggccgcgtcgaccaaatccttcagacttgacagtgtgaggctggggttggcagtctgcttaacaagatgctgggaccacctctgaattagtgaatcagggagctgctgtgtgatcccctcctccaggctttcttggagtttgtctctgccacttcctcaagccctttaaaaaggctcctgtgctttagagagttaggatgttaatgaccgttcttttttcttgtactttattaagtactagtcttactagactagtgcttaagtggcagtgtctgcctttgccttctcccatctctttatgctcctttcttccaact

SEQ ID NO: 426 - DNA, 372 bp, Homo Sapiens
  misc_feature (8)..(8): n is a, c, g, or t
  misc_feature (10)..(10): n is a, c, g, or t
  misc_feature (14)..(15): n is a, c, g, or t
  misc_feature (27)..(27): n is a, c, g, or t
cctcgcgntntgtnnttttcaacatanataaaataaaactttatttttaataataaaattaatgtttctagtaaggaaaagacagtatgtcattcctttagcagtacaaacaatcttttatccaaaagaatacattgggttttattgtgtcatttgtctgaatacagacacagtggaatatctaaatgataccctgctctgaactccaagttgaaagtaagtttttattatacttgagggaaacaatgggttcagctgcttattgcaaggagcaattgccaagggagagttaaactcaattactgtaaccatactgaataaaaaatactgccaagaacaaaaatacgcctgggtaaagacagccactgaata

SEQ ID NO: 427 - DNA, 1301 bp, Homo Sapiens
ctgccttgctccacacctggtcaggggagagaggggaggaaagccaagggaagggacctaactgaaaacaaacaagctgggagaagcaggaatctgcgctcgggttccgcagatgcagaggttgaggtggctgcgggactggaagtcatcgggcagaggtctcacagcagccaaggaacctggggcccgctcctcccccctccaggccatgaggattctgcagttaatcctgcttgctctggcaacagggcttgtagggggagagaccaggatcatcaaggggttcgagtgcaagcctcactcccagccctggcaggcagccctgttcgagaagacgcggctactctgtggggcgacgctcatcgcccccagatggctcctgacagcagcccactgcctcaagccccgctacatagttcacctggggcagcacaacctccagaaggaggagggctgtgagcagacccggacagccactgagtccttcccccaccccggcttcaacaacagcctccccaacaaagaccaccgcaatgacatcatgctggtgaagatggcatcgccagtctccatcacctgggctgtgcgacccctcaccctctcctcacgctgtgtcactgctggcaccagctgcctcatttccggctggggcagcacgtccagcccccagttacgcctgcctcacaccttgcgatgcgccaacatcaccatcattgagcaccagaagtgtgagaacgcctaccccggcaacatcacagacaccatggtgtgtgccagcgtgcaggaagggggcaaggactcctgccagggtgactccgggggccctctggtctgtaaccagtctcttcaaggcattatctcctggggccaggatccgtgtgcgatcacccgaaagcctggtgtctacacgaaagtctgcaaatatgtggactggatccaggagacgatgaagaacaattagactggacccacccaccacagcccatcaccctccatttccacttggtgtttggttcctgttcactctgttaataagaaaccctaagccaagaccctctacgaacattctttgggcctcctggactacaggagatgctgtcacttaataatcaacctggggttcgaaatcagtgagacctggattcaaattctgccttgaaatattgtgactctgggaatgacaacacctggtttgttctctgttgtatccccagccccaaagacagctcctggccatatatcaaggtttcaataaatatttgctaaatgaaaaaaaaaaaaaaaaaaaaaaaaaaaaaaaa

SEQ ID NO: 428 - DNA, 441 bp, Homo Sapiens
  misc_feature (134)..(134): n is a, c, g, or t
  misc_feature (362)..(362): n is a, c, g, or t
  misc_feature (411)..(411): n is a, c, g, or t
  misc_feature (425)..(425): n is a, c, g, or t
ttattctattttacctctaacagaagtttaaggttcgtgtaagtttcgttcctctctgattgtaggggagacgcccagagcgccatttggaggagagaacctggcatcctttccttaccttgatttcaggtacncagctcctagcaaatgtgtcttcctcccagggttctttggggtaaagaatttggtgagaaggagctgaatgttatggctgcgtttctcagccacttgctccggagccaagcatcctctcaccctttctttcaacttggtagccagaaaataccgggttgagcatcaggggattctcaacccgtgtcaagctccagcccctgcctggttgttgacagacgttttcctgnattgcctggtttgctctcctggaaatgaaggtccatggggcagtattancccacaacagccantccaaaaatcaggtcg

SEQ ID NO: 429 - DNA, 315 bp, Homo Sapiens
  misc_feature (116)..(116): n is a, c, g, or t
  misc_feature (128)..(128): n is a, c, g, or t
gcagctgcccacctcaccctcagctctggcctcttactcaccctctaccacagacatggctcagtcactggctctgagcctccttatcctggttctggcctttggcatccccaggncccaaggcagtnatggaggggctcaggactgttgcctcaagtacagccaaaggaagattcccgccaaggttgtccgcagctaccggaagcaggaaccaagcttaggctgctccatcccagctatcctgttcttgccccgcaagcgctctcaggcagagctatgtaaccagcccaggggtttcaggaaggacaagggggg

SEQ ID NO: 430 - DNA, 438 bp, Homo Sapiens
  misc_feature (54)..(54): n is a, c, g, or t
  misc_feature (58)..(58): n is a, c, g, or t
  misc_feature (117)..(117): n is a, c, g, or t
  misc_feature (149)..(149): n is a, c, g, or t
  misc_feature (396)..(396): n is a, c, g, or t
cagcctcgggtccaggatgttctcctccggctcccagctgttatgtctgcaaanaagngacagggcagcattagacgccagctgatgatcaccgctttgcaaggcagcccgaggggntcgcctcaccgctcctcgacttgggccgatgnagtggcaccgtagcaccatggcacttctcaaagtccaaacccaggttttggaggctggccaccccccaccaagccagcactctaacctcagacccaaaggaaactgccgctccaaccccccaatttaaaacaaggccacaagaggactcccacaagtctcttgcctgggagaaaaaacaaaccccccattaaaacgcaaagttgcagagagggattcccccaaaacccttggcccgggaagccaganggaggaaggggaaggcaggttccagcatgcagggaaggggca

SEQ ID NO: 431 - DNA, 5015 bp, Homo Sapiens
gcgctccgcacctgggcactcccagcgatgcgcagcggggcagcgccggccccgccgatggagctgctgttgctgccgccgccgccgcccggagcgccccgctccgcccgcgccccgtgcgcctgagcaccgagctcgcccctcctccgcgctaactccgccgcccgctccccaggccgcccgcgctccccgcgcgcctcctcgggctccacgcgtcttgccccgcagaggcagcctcctccaggagcggggccctgcacaccatggcccccgggtgggcaggggtcggcgccgccgtgcgcgcccgcctggcgctggccttggcgctggcgagcgtcctgagtgggcctccagccgtcgcctgccccaccaagtgtacctgctccgctgccagcgtggactgccacgggctgggcctccgcgcggttcctcggggcatcccccgcaacgctgagcgccttgacctggacagaaataatatcaccaggatcaccaagatggacttcgctgggctcaagaacctccgagtcttgcatctggaagacaaccaggtcagcgtcatcgagagaggcgccttccaggacctgaagcagctagagcgactgcgcctgaacaagaataagctgcaagtccttccagaattgcttttccagagcacgccgaagctcaccagactagatttgagtgaaaaccagatccaggggatcccgaggaaggcgttccgcggcatcaccgatgtgaagaacctgcaactggacaacaaccacatcagctgcattgaagatggagccttccgagcgctgcgcgatttggagatccttaccctcaacaacaacaacatcagtcgcatcctggtcaccagcttcaaccacatgccgaagatccgaactctgcgcctccactccaaccacctgtactgcgactgccacctggcctggctctcggattggctgcgacagcgacggacagttggccagttcacactctgcatggctcctgtgcatttgaggggcttcaacgtggcggatgtgcagaagaaggagtacgtgtgcccagccccccactcggagcccccatcctgcaatgccaactccatctcctgcccttcgccctgcacgtgcagcaataacatcgtggactgtcgaggaaagggcttgatggagattcctgccaacttgccggagggcatcgtcgaaatacgcctagaacagaactccatcaaagccatccctgcaggagccttcacccagtacaagaaactgaagcgaatagacatcagcaagaatcagatatcggatattgctccagatgccttccagggcctgaaatcactcacatcgctggtcctgtatgggaacaagatcaccgagattgccaagggactgtttgatgggctggtgtccctacagctgctcctcctcaatgccaacaagatcaactgcctgcgggtgaacacgtttcaggacctgcagaacctcaacttgctctccctgtatgacaacaagctgcagaccatcagcaaggggctcttcgcccctctgcagtccatccagacactccacttagcccaaaacccatttgtgtgcgactgccacttgaagtggctggccgactacctccaggacaaccccatcgagacaagcggggcccgctgcagcagcccgcgccgactcgccaacaagcgcatcagccagatcaagagcaagaagttccgctgctcaggctccgaggattaccgcagcaggttcagcagcgagtgcttcatggacctcgtgtgccccgagaagtgtcgctgtgagggcacgattgtggactgctccaaccagaagctggtccgcatcccaagccacctccctgaatatgtcaccgacctgcgactgaatgacaatgaggtatctgttctggaggccactggcatcttcaagaagttgcccaacctgcggaaaataaatctgagtaacaataagatcaaggaggtgcgagagggagctttcgatggagcagccagcgtgcaggagctgatgctgacagggaaccagctggagaccgtgcacgggcgcgtgttccgtggcctcagtggcctcaaaaccttgatgctgaggagtaacttgatcggctgtgtgagtaatgacacctttgccggcctgagttcggtgagactgctgtccctctatgacaatcggatcaccaccatcacccctggggccttcaccacgcttgtctccctgtccaccataaacctcctgtccaaccccttcaactgcaactgccacctggcctggctcggcaagtggttgaggaagaggcggatcgtcagtgggaaccctaggtgccagaagccatttttcctcaaggagattcccatccaggatgtggccatccaggacttcacctgtgatggcaacgaggagagtagctgccagctgagcccgcgctgcccggagcagtgcacctgtatggagacagtggtgcgatgcagcaacaaggggctccgcgccctccccagaggcatgcccaaggatgtgaccgagctgtacctggaaggaaaccacctaacagccgtgcccagagagctgtccgccctccgacacctgacgcttattgacctgagcaacaacagcatcagcatgctgaccaattacaccttcagtaacatgtctcacctctccactctgatcctgagctacaaccggctgaggtgcatccccgtccacgccttcaacgggctgcggtccctgcgagtgctaaccctccatggcaatgacatttccagcgttcctgaaggctccttcaacgacctcacatctctttcccatctggcgctgggaaccaacccactccactgtgactgcagtcttcggtggctgtcggagtgggtgaaggcggggtacaaggagcctggcatcgcccgctgcagtagccctgagcccatggctgacaggctcctgctcaccaccccaacccaccgcttccagtgcaaagggccagtggacatcaacattgtggccaaatgcaatgcctgcctctccagcccgtgcaagaataacgggacatgcacccaggaccctgtggagctgtaccgctgtgcctgcccctacagctacaagggcaaggactgcactgtgcccatcaacacctgcatccagaacccctgtcagcatggaggcacctgccacctgagtgacagccacaaggatgggttcagctgctcctgccctctgggctttgaggggcagcggtgtgagatcaacccagatgactgtgaggacaacgactgcgaaaacaatgccacctgcgtggacgggatcaacaactacgtgtgtatctgtccgcctaactacacaggtgagctatgcgacgaggtgattgaccactgtgtgcctgagctgaacctctgtcagcatgaggccaagtgcatccccctggacaaaggattcagctgcgagtgtgtccctggctacagcgggaagctctgtgagacagacaatgatgactgtgtggcccacaagtgccgccacggggcccagtgcgtggacacaatcaatggctacacatgcacctgcccccagggcttcagtggacccttctgtgaacaccccccacccatggtcctactgcagaccagcccatgcgaccagtacgagtgccagaacggggcccagtgcatcgtggtgcagcaggagcccacctgccgctgcccaccaggtttcgccggccccagatgcgagaagctcatcactgtcaacttcgtgggcaaagactcctacgtggaactggcctccgccaaggtccgaccccaggccaacatctccctgcaggtggccactgacaaggacaacggcatccttctctacaaaggagacaatgaccccctggcactggagctgtaccagggccacgtgcggctggtctatgacagcctgagttcccctccaaccacagtgtacagtgtggagacagtgaatgatgggcagtttcacagtgtggagctggtgacgctaaaccagaccctgaacctagtagtggacaaaggaactccaaagagcctggggaagctccagaagcagccagcagtgggcatcaacagccccctctaccttggaggcatccccacctccaccggcctctccgccttgcgccagggcacggaccggcctctaggcggcttccacggatgcatccatgaggtgcgcatcaacaacgagctgcaggacttcaaggccctcccaccacagtccctgggggtgtcaccaggctgcaagtcctgcaccgtgtgcaagcacggcctgtgccgctccgtggagaaggacagcgtggtgtgcgagtgccgcccaggctggaccggcccactctgcgatcaggaggcccgggacccctgcctcggccacagatgccaccatggaaaatgtgtggcaactgggacctcatacatgtgcaagtgtgccgagggctatggaggggacttgtgtgacaacaagaatgactctgccaatgcctgctcagccttcaagtgtcaccatgggcagtgccacatctcagaccaaggggagccctactgcctgtgccagcccggctttagcggcgagcactgccaacaagagaatccgtgcctgggacaagtagtccgagaggtgatccgccgccagaaaggttatgcatcatgtgccacagcctccaaggtgcccatcatggaatgtcgtgggggctgtgggccccagtgctgccagcccacccgcagcaagcggcggaaatacgtcttccagtgcacggacggctcctcgtttgtagaagaggtggagagacacttagagtgcggctgcctcgcgtgttcctaagcccctgcccgcctgcctgccacctctcggactccagcttgatggagttgggacagccatgtgggaccccctggtgattcagcatgaaggaaatgaagctggagaggaaggtaaagaagaagagaatattaagtatattgtaaaataaacaaaaaatagaacttatttttattatggaaa

SEQ ID NO: 432 - DNA, 476 bp, Homo Sapiens
acagctaaagagcattagaaaataagtctgctaaataaaatgggtgaagcagctcaggatgatcttggtgggcaggaggaggggttggataaaacacaaggtctgactataaagttgtgaggcctcttgccttgcatggcttcaaaggtaatcccaaaggggaaccctaagtgttcttggcacatgcaacatcaagaaaataactccaattatgctaactcttgagtgcatatgttctagtgtatttggttaaaaaggtggctttgttcattttcagtcatatttcgtataagcagaaatggaaaactccatctctgtgatttctcccaagggaaagatctcatctactgcttagagaattaaaatgaaaagcacttggtgtcatgtctacattagccccccccccccgcaaaatgtgcaatgggtaattcctgatacctgagtcttccccgtttggaaaagtgggtaaggacagg

SEQ ID NO: 433 - DNA, 299 bp, Homo Sapiens
cggaccgctggcggcacggcgcagggacgcgcggctagggcgggttacaacaacggcggacggccctggcagcacaggtttctgctgggtgtcagcggggggaggcaggtccagcgttacaggtgtgtgctggcccagcactccggtagccatgggcgcgatgggacgggtggtgggcaggccttgctttagtgcctcctcgtacgagggaggctcatctatttgcgtcaccagagtttcttccctgtcgggccgcggacgcttttcgccacgcccctctggagacactgtctccacgg

SEQ ID NO: 434 - DNA, 151 bp, Homo Sapiens
  misc_feature (30)..(30): n is a, c, g, or t
cacgattccagagctggctggacccaagwnrgtgaagagagcacttttcagccccaggaagggcaaagaagagagaaaatcagcctgtctgctctctccttggctcaacaaggcctctaacagtctctgtcctctattcgcacacggcata

SEQ ID NO: 435 - DNA, 691 bp, Homo Sapiens
gctagaattgcatttaatcactgtgaaaagactggtcagcctgcattagtatgacagtaggggggctgttagaattgctgctatactggtggtatggattatcatggcattggaattttcatagtaatgcagatccaatttctttgtggtacctgcagtttacaaaataatttgacttcagtgagcatattggtatctggatgttccaatttagaactaaaccatatttattacaaaaagatattaatccctctactcccaggttccctttatatgttaagatataatggctttgaggggggaaaaaataaacctaggggagaggggagtttcctgtagtgctgtttcattagaggatttcagtaaattaaattccacagctaattcaataaataatggtacatttaagtgttctgattttaataatatatttcacatttatccacacagtaacaatgtaatatgttaatgtaaataaaattggttttgatactcagaaataacaagaatttaattttttaaatttgtttacagtcctgggaaaagtaagaattatttgccaaaataagaggaaagaaaaccttagtattattaatgagtttaccatagaattgttggaaatactgaagacaggtgcaatttactaaaactttgtttttaaactattgtagaggctgcattagaagaaatg

SEQ ID NO: 436 - DNA, 374 bp, Homo Sapiens
  misc_feature (323)..(323): n is a, c, g, or t
  misc_feature (353)..(353): n is a, c, g, or t
  misc_feature (368)..(368): n is a, c, g, or t
tactctttacgttgagttgatcaattttccatactaagattttcattcagaatcaaaattaagaaagttggactgaaaatatgaaaaatgcttaactattgttctcttcctataattctctaattataacatagtaatttacatgtagttggacatgtacactcaagtctaagaatatatgagtggatcatttaccgccccccgccccacaacatctataaggggcaaaaagtctttttctaataaggtattcttctatgggtaggtacctacagatctgccccttcttcttctaaaggggtaaggtcataatctgtggtaantactaccatttttggggggtgcttcactanggccccggtttctcntcttaa

SEQ ID NO: 437 - DNA, 606 bp, Homo Sapiens
gtttaaggggtcaaagttggtatcattaacagggcaatgacttgacccttctttcaactgatcttactggtagttgtctctagtttttaagtaaattaatgatggaccatcccccaaacagagaactatgggggtatgaaacaaggctgaaggcttttaaccatgggagaaaaaggtgctggtattattcatatagcataacctgaggttggagaggaccacttgggagcctgtaaccaaaactagaaggtaacttctgggatggacggaggttcccttgaagcagtgccaacctaaatctacctcaggtaagtagttagattaactttttcaagatttcagaccaaacaagacaacttgtattcagttgatgtattcctatgctttaatgtttttgtttgcccttaattattaaataaacatttgttctgaaaaaaaaaaaaaaaaaaaaccatttgcggccgcaagcttattccctttagtgagggttaattttagcttggcactggccgtcgttttaacaacgtttgactgggaaaaccctggcgtttccccaaattaattgcctttgcagacataccccttttgccgcttggcgtaatagca

SEQ ID NO: 438 - DNA, 2298 bp, Homo Sapiens
acgcgtcggccgcccacccttgccacccagacctacacacccacgaagaaaacctttaccaccaaataatgtcactggaaagccaggaagtgcaggaatcatttcatcaggcccaataactacaccacccctgaggtcaacacccaggcctactggaactcccttggagagaatagagacagatataaagcaaccaacagttcctgcctctggagaagaactggaaaatataactgactttagctcaagcccaacaagagaaactgatcctcttgggaagccaagattcaaaggacctcatgtgcgatacatccaaaagcctgacaacagtccctgctccattactgactctgtcaaacggttccccaaagaggaggccacagaggggaatgccaccagcccaccacagaacccacccaccaacctcactgtggtcaccgtggaagggtgcccctcatttgtcatcttggactgggaaaagccactaaatgacactgtcactgaatatgaagttatatccagagaaaatgggtcattcagtgggaagaacaagtccattcaaatgacaaatcagacattttccacagtagaaaatctgaaaccaaacacgagttatgaattccaggtgaaacccaaaaacccacttggtgaaggcccggtcagcaacacagtggcattcagtactgaatcagcggacccaagagtgagtgagccagtttctgcaggaagagatgccatctggactgaaagaccctttaattcagactcttactcagagtgtaagggcaaacaatatgtcaaaaggacatggtataaaaaatttgtaggagtgcagctgtgcaactctctcagatacaagatttacttgagcgactccctcacaggaaaattttataacataggtgatcagaggggccatggagaagatcactgccagtttgtggattcatttttagatggacgcactgggcagcaactcacttctgaccagttaccaatcaaagaaggttatttcagagcagttcgccaggaacctgtccaatttggagaaataggtggtcacacccaaatcaattatgttcagtggtatgaatgtgggactacaattcctggaaaatggtagatgctgcacaaagttaccttctgtttcatcattgcaaacaaaaatcattgaaaatactatgccgcattcatttaaagctattttgtttactatgtataaaagtctacaatctaattaatagcaatactagatgtttattattagaaaagattgctgagagtatttatcaggttttacaaagtcattttaagaaagcaagatactgatgttaacagaataacatttttggggaagctggctccctattcatggtattttaagagatcatttgtatattatttatcacactgttgtaatgatgttttgagatacttttataacaaaattaacatcaaaaaggtatatactttttaaaaaaaatttacttttattgatgtgtactcttcctattgatgagttaattccataaatctctacttagtttaacttattggatcaaattatcttcagcatgtatatctggggaaaaaaggtccgaattttcacatttatatttaaacttcaattttttatatttaaacttcaattttttagcaacagctgaatagctttgcggaggagtttaatagttacacattcatgctaatatacatttcctttaaacatccacaaattcttaaaaagattgaatcagtaaatttcatttcagctaaaaatggagtctaatatattgtttcaaaagatacatttttacccaccataaatgttacaatatctgaatatgctttgtcaaactatccctttatgcaatcgtcttcatattgtttttatgattctaatcaagctgtatgtagagactgaatgtgaagtcaagtctgagcacaaaaagataatgcacgatgagattgcctaccattttataggatatttactatgtatttatacgttaagacctctatgaatgaatgtatcagagaatgtctttgtaactgtttaattcaatctgtaataaaaatctaactaactaactcatttatttctattaaaaaggtattgtcctttaggcggggaatgggaatccttgctgcactgttgcagtcattctgaaaggacctttccctgtacttacctttcaacatgcttcaatcttatcaacgctacattttgtatttttcaaacaagtataaattctgcaataaagagatgtagtttttttttaaaaaaaaaaaaaaaaa

SEQ ID NO: 439 - DNA, 513 bp, Homo Sapiens
  misc_feature (513)..(513): n is a, c, g, or t
gggcgggtcctgagtcgcgaccctggtccggacctgacctgaattgcgaccccaacctggactgctcccctgaccgcaacccctacccccgcccaccagtatggcccggcacgtgttcctaacggggcccccaggagttggaaaaacaacattgatccataaagccagtgaggttttaaaatcctctggtgtgcctgttgatggattttataccgaagaagtcagacagggagggagaagaataggattcgatgtcgtcacgttgtccggcacccgggggcctttatcgagagttgggttagagcctccacctggaaaacgtgaatgccgagttgggcagtatgtggtcgacctgacttcttttgagcagttggcactacccgtcttgaggaatgccgactgcagcagtggcccagggcaaagagtgtgcgtcatcgatgagattgggaagatggagctcttcagtcagcttttcattcaagctgttcgtcagacgctgtctaccccagggcn

SEQ ID NO: 440 - DNA, 356 bp, Homo Sapiens
  misc_feature (196)..(196): n is a, c, g, or t
  misc_feature (236)..(237): n is a, c, g, or t
  misc_feature (249)..(249): n is a, c, g, or t
  misc_feature (343)..(343): n is a, c, g, or t
ggagaggccctagttctgctcagaagattcaagtccatattcagggaggggtcactgtccacacccccaggtccaagtgagggatggtaggaggagggaggcgaggctggggggccccggctcaggacaggatgggggacaagcaagcaaagcaaaacatgactccacatcagcagaacaaagacaaacacaagtnttactatgaaaatccgcatacataaatattaaataatagnncctaataaaagncagatcccaaacatgaaaggttattttgttactgtaacttacttaaactgacttaatctaataaaaatactatttcttcatagtagtcaggtancaataaaaaacat

SEQ ID NO: 441 - DNA, 3267 bp, Homo Sapiens
cgcgggcttgcgggcaggggctgcagggaggaggagaggacccgcgcccgcgggggctgggcggaggcggggccgggcttccggacagaggccaatcgctgccctcggggcctccagcgccggctctgggccgaggcagccagagcgcggaagaggcctggaaatccacgcggattcccggagacggcgcctctgctctgcgggttcgtggcgaggaagtccacccactgctcccgggcgcaggtctgcaggtccgcgcccactgcccgcggcgccactgaccatgtcggagacagagtttcaccatggtgcccaggctggtctcgaactcctgaggtcaagcaattcacccacctcagcctcccaaagtgctggaatgacagtgactgatcaggcttttgtcacactagccaccaatgacatctactgccagggcgccctggtcctggggcagtcactgaggagacacaggctgacgaggaagctggtggtgttgatcactcctcaggtgtccagcctgctcagggtcatcctctcgaaggtgttcgatgaagtcattgaagtgaatctaatcgatagtgccgactacatccacctggcctttctgaagagacctgagctcgggctcaccctcaccaagcttcactgttggactctcactcactacagcaagtgtgtcttcctggatgcagacactctggtgctgtccaatgtcgatgagctgtttgacaggggagagttttctgcggccccggaccccggatggccggattgcttcaatagcggggtgtttgtcttccagccttctctccacacgcataaactcctgctacagcacgccatggaacacggcagctttgacggggcagaccaaggcttactgaatagtttcttcaggaactggtcgaccacagacatccacaagcacctgccgttcatctataacttgagtagtaacacgatgtacacttacagccctgccttcaagcaattcggttccagtgcaaaggtcgtccactttttggggtccatgaaaccttggaactacaagtacaatccacagagtggctcggtgttggagcaaggctcagtgtccagcagccagcaccaggcggcattccttcatctctggtggacggtctaccagaacaacgtgctgcccctttataaaagcgtccaagcgggggaagcacgcgcgtctcctggtcacacactttgccacagtgatgtgggggggccgtgtgcggattcagcctctggtgttggagagccgtgtgaaaattcaacacccagtgcgggcgtgccgtgtgcaaattcaccactgggttctaaccagcctgctcagggccttccggagccgacccagatagtggatgagaccctgtccctacctgaaggacgccgttcagaagatatgatagcttgtcctgaaactgagactcctgccgtgataacgtgtgacccactgtcccagccttcccctcagcctgcagacttcacagagactgaaaccatcttgcagccagcaaataaagtcgaaagtgtctcatccgaggaaaccttcgaaccaagccaggaactccctgctgaggctctcagggaccccagtctgcaggatgcactggaggtcgacctggccgtctctgtttcccagatctccatcgaagagaaggtgaaggaattgagccccgaggaagagaggaggaagtgggaggaaggccgtatcgactacatggggaaggacgcgtttgctcgcatccaggagaagctggaccggttcctgcagtaatccggcagctggtgggcgttgtgtgtagttagacaatgtcctgttgggtggtcctgttgcgtggagatctcctctggtcctttcaaagggaaacgctgttgaaccttgtgcctctatttatgcttaatccatttgagtgcctcacacaaaaaacgtagagtatagaaatccaccttaaagcccctcgccccaacttctccaccaacgccttctgggctttcttcagaggtcacttctacccttgaagctgtcggcaaaagcgagcagtaataacattctagtagactctcgatggtggtctccgctcttgcccgaaggacctctgaagtacgctggatctgtgttgtacaggtgctgtgagacctaccctattcagaattaaacctcactgcaaatttcctcccatcacgaagctaacaacactaatatacgtatttagcacctctgaggctttgccatggagaccatttctgtagggctaaggaaacatttagacgtggtgactgactttcatttggacttggcgaagtgtatctgagaaacacctcggctgtggtctctctgctttaaatcctaacaggacttcctagagcgttgacagaaattctactcgtggacgttgggaagaaagattgtaggtggcttggggaatgtgggtggcttagaggatctaaaccgattcacttcctggttgagaagcaacgagggcttgctctaaatcgtttagaggataacaggatctagagatgctctctgcttgacaacaaaagtcagggtgcagtcggtccacccttgactgctcttggcttggtctctaccctcactacctcagttctcaataacttagtgaatcactgccctcctcaaagccatttccactcagctctttccagagaattctcagttttatgagacgggaaactttatttcacgagaaagcctcattgtcagaagtatcttcattcaatgggcacaatatgctgtgtatctcaccaggtagctgtcaggggccaccgagagtgtcgttaaaaatgggcatcgttgtaataaaggaggaaagtgcgacttttgaaatgtttggaaggtttatttctcatgcacattccagggaaaagcagagagtaaattagagacgggataggaaggccgtgggagaactcgatcctagcctgtgtcagctggatgtgtttacgtggagaggcgtggccactttttaggtcacctgaagcagtttagcctttggatagaggaacctgcctgaatttatggcattagtggtggcatttttttgtgtacaagatgtgggtgatggaggggctgtttctttttccgtgtgggtggttaataatcgtcagtctcggagggcgatgctcgtaggatatttcaggtgagtcagggttggatggtcatcggctttcagagggagaccacgggaatgttcagggaaacaatgtcagcttctctgaggaccagaattc

SEQ ID NO: 442 - DNA, 334 bp, Homo Sapiens
  misc_feature (156)..(156): n is a, c, g, or t
  misc_feature (197)..(197): n is a, c, g, or t
  misc_feature (207)..(207): n is a, c, g, or t
  misc_feature (265)..(265): n is a, c, g, or t
aaagggcgtctcagggaacccccacattctctcactgaagtttcccaccaggatgaccccacagccagagtcccttggcagcccctcaccccagaccccccttctaaggaaaaagagaggttcagagcgttggaccttcatgaacagtggcctggntggcgtggcagggcaaggccacccactgccatcccccttcntgtgtgtccntctcccccagttatgaggcccagggcttgagctctcttccccaagcattgcccccacncggaaaccccaccttttgggagagttaattgtctgtggtgagggtgcttaacctatcagccctgagaac

SEQ ID NO: 443 - DNA, 448 bp, Homo Sapiens
ttttttttgagacagagtcttgctctgtctcccaggctggagtgcagtggcgctatctcggctcactgcaagccccgcctcctgggttcacaccattctcctgccttagcctcccgagtagccgggactacaggtgtccgccaccacacctggctaattttttgtatttttagtagagacggggtttcaccatgttagccaggatggactcgatctcctgacctcgtgatccacccgcctcggcctcccaaagtgctgggatcacaggcttagcaccacgcccagccctaaatttcagattagccttaggggttgcctttgtcctgcccttccctcatagaccctctgccaccagccacacccagagccggggcaggacatgtggccacctacccagccctcccggggtcacaggccgagagcactccccagctggctgcttccccag

SEQ ID NO: 444 - DNA, 331 bp, Homo Sapiens
aatagtgattaaatttctctagaaagaagttaacagctcattagaaaagttttaacctgtgaaataagtatttttctcaacattctttaaagtttttatataagttaacactaggtaaacattctgcatactagaagtcagtttattacaaatacatgtcaaaaataaagattatacaaggcaccaaactactagatttggcattaaaacaaatgtttatttctaatcacaacaaaattataatgaataaatgttcttgctttgtatggaaatacaattctttattaaagttaacagaaaggaacttgattcgtttgtaccagtaaaagag

SEQ ID NO: 445 - DNA, 853 bp, Homo Sapiens
  misc_feature (468)..(468): n is a, c, g, or t
  misc_feature (544)..(544): n is a, c, g, or t
  misc_feature (582)..(582): n is a, c, g, or t
  misc_feature (667)..(667): n is a, c, g, or t
ttgacttggttaacatttatttaattttgggaacacagtaaaaaacagaaacaaaacatctatttcttcacaattgtgaaaatgtctggcttgaaacacctttgacatttatctcactttcgctctcaagtttcaggctgctgcatccatggcggctagctggcagtgatgctcttttctgctctcaaggtttctttgggcttggaatagttccacggccgtctattttctgtgaatccataaagttttctaagggccactcgagcagcctcttcttctgcaaccaatactgtttccccaggtccttctgcaatcaactttttatcacagtataagccaacaaaatacaaaggcaaagctgtggtgccaccagactgcctagtaagtcttgattcaggagctgaaacattccttttcttcagttcttctaccaatagccccatgggaatattatcttccacatctcanagagctcttttccagtcatttgagtaatttagaagtccctgatgaaaagtgcagtcctctcaggtccactgctctngtacaggggctccataactgcaaagaaagtctgctgtnacacagctgggggcacctggaattcttcactcagtgtaactgctcacagcaagtttctagcacgtgacacacgactttctaccangggaaagtcaacaagattttatgcctcagagggcatggctggtactcgctccagaaacttgtaaagccagtcgggaaaagagtcttggtccgaagtctgatccttaaatcgagaacagcttttcttttcacggggtgtgtgctctcctttaatacagtttacaaagcactttggagatagagagtt

SEQ ID NO: 446 - DNA, 525 bp, Homo Sapiens
ttttttttttgctatttttgttttctctcctctgtgttggtcgcctgtctcgctccctctcatgctctctttctctcctctattttgtctctcactattcgtgttttgtgtttgtttctaggtttggctcaattggtaagggtgggattgaatttgctgagccccctagtgtaacagtcttctgcctttgtgggtaaagagtggagagggggagggggacgacagacagacatcccttcttcccacccccctccccacctgccccccggcaaccgagggtgcccatttggtttggtttctattgtacagacatctcaggatggctcacataggcgggaaggagggaagtcgtcacagggcagttttcttggctgtgacctccttccccacccctccctggctggtgttctggaggggaaggctgtggaaaggtgttaattctcgacaggaggaaggagaggaggaaatcccctctgcacctccacctgctccatccaggaagaatgggactctggagctttaagt

SEQ ID NO: 447 - DNA, 452 bp, Homo Sapiens
  misc_feature (406)..(406): n is a, c, g, or t
acgcgtccgctgcttctctataggtgacccccgccccaaagtcccccctcccactaacttctctttgagaagagagtaaaaccgaattcgagagaaaagaggcagtaactattcgggaggaggcagactggagtgggcaccagtcccgcggagcctcagcgcccgccgcgtccctccctccgcccctttcgcccacacctacccgcccccgccggcccggctctcagtagcgtcgcccgaggctgcagcagcgcatcccggggcatggcgcggcgggggcgcggagggctcggttcggagggggccgggagcccgggcgccctggagtgaggaggaccgggagctggctctggaggctgcggaggcgacgccggagagaacgaagcctcggctgggagcggatctntcgaagatggtttggctgccttggagatttgagatctgatgccacg

SEQ ID NO: 448 - DNA, 515 bp, Homo Sapiens
aaacaacaagccattgtgggcattttcccatgtgagtgcagttaatggctgcatgatgctctgctggacggcaaccacagtgtatttatgcagtcaggcccccgaatgaatagattctaacttctgctcttcaaacaatgctgcgttgatgaacaccctcaagctggcctgtctgcgcccttgtatggtgagacagactcctagggatggacggcatgggaagctggatgcgacatagtcaaactgccccccactgagctgaatgcagccagcactgcctgccccagagtggggccctggatggaggcagaaggggtgaggagggattctgggccctggggccttctcgcctatgcaggaaaccaggcttcaccttggatttgggttaagatctgacagaaccacccttttcattttacttgcataactggtaagcattacaaagagattcagaatcacaaaaggcaacattcaaatggccaataaacatataacaaggtgctcaatttgtcatc

SEQ ID NO: 449 - DNA, 14977 bp, Homo Sapiens
gaattcaagggcgtagtatgatctgatggcacctgtgaagagctgctgcactccagcctgggcaccagaacaatactgtttcagacaaaaacaaaagaaaccagaaaaatcagcatgtactactgtgagaacataggtgaacaattcttgtccaagaaaaagtcaaatgtgaatcacagctgagccacccacatcacgatggctgagtgaatctgtgtctgatttagccacagttcagctctcttgtagaggcagaaagcagagcggttgaagtgtgtgtaggctttctattcttatgtcccaggttcaaatcctgggtctttattttccttagtgactgcgagtccaggcctcagtttcctaatctgtgaaacagggatcataacagcacctgcctcaagggttgttgtgagcaatatatgaagcaatcattataaggcattgagcacagagcctgagagtatgagcccgtaaactcactgtgagtttcagctgttaactcaaagcagctttttgttgccaagtcgctggctaaagatgcccaagggctatggtctagagagaagcacctgaacccacctaagcagttgggttgggggatcccgcctggctgctccgccagctcttgtcctgcagaggcccccacttcgcaggtcagatgtgtggttcacctcctgtccagccttcccaggcctgcgcaggagcctaccacctgctcactggtttgtaagtcattcaggggctgggcgcttatagagtcactcaaggcggtgactcacacctataatcccagcactctgggaggccgaggcaggtggttcacttgaagtcaggagtttgagaccagcctggccaacgtagcaaatgaaaacccgtctctactaaaaatacaaaaaattagctgggcgtggtagcacatgcctctaatcccagctactcggggaggctgaggcagaggctgcagtgagctgagaccgcaccactgcactccagcctgggtgacaagagtgacactgtctcaaaaaaaaaaaaagtcactggactcccccaagccagtcccctacatttcacatcaggagggtcactatggtgcctcctgcgtcgggctgtggtgggttcccacacgaacccccatatctctactccccatggtagtcagaggagcctttaaaaagggtaaatttgccgggcacggtggctcacgcctgtaatcccagcacctctggagggggaggcaggaggattgcttgaggccagtctgggcaacagagtgagagcccatcttttaaattaaatttaaaaatataaaaataaaatggctgggcgcggtggctcacgcctgtaatcccagcactttgggaggctgaggcaggtggactgactgaggtcaggagttcgagaccagtctggccaacatggtgaaaccctgtctctactaaaaatacaaaaaaattagccgggtgtggtggtgtgtgcctgtaatcccagctactcgggaggctgaggcaggggaattgcttgagccagggaggtggaggttgcagtgagccgagattgcgccactgcactccagcctggacgacagagcaagactccatctctaaataaataaataaataatttttattaaagggtaaatcagtcaaatttccaaaagaattttgagaatccagagcccattgctctgataattaaattcaacatctggacccagcttggcaagtgctctgtgatccagcccgttacctacctctcatctcatctctcggccatgctccaagaagtgtctgctccccaagtgcataagctcatgcccccaggcccatgtccttgcctctccctctgcctgggacactcttcctccagatctttacacttttgcctcttttttcagcctcagctcaaacatcacctcctcccagaggtcttccctgaccaccccagggatagcagccctcccgcttccccaggcactcccacattaccttctttatcattttcttccagagctcttaggatgatctgaacttctctcataaactggcttattcacctgtgaactgcctgcttccctcgctataactgaagcactggaagaggtcctgcacccagcaggcactcaatgagtatctgaggaatgagtgaatgaaatgcccagtgcacaatcaacctccacaaaagcagtttttcttttcacatatcacagcccctctccttgctcacccgcctcgctgaggggctcctgagaacctccgtagaggtctccatcagccaaaaagcatctgcaccatcagagagggcccctcactgccgctcgcagtgctccctgctgccacgtgcagccccttgagcatgagcctgttgacacaggttggcacacggtgtctggcttctgtaaatgctctctgctcccaggtgtgccgtgccccattgaaggacagcactcacactcctccaggtattaactgactttttccccagcaatgtttgttttagggattaaagtttgtggaggagcctataatttccagactcatctgttcctttcctggcagccagcacatttgtcattctatttttcccaagtccctgataataccgttccagacatgttgatttgatggcatcagtcaacggaaagactctctggggcctgccgtaggccagaggacaggctctccgggccacactcaggggcgactgagccaactcttcacgccattcctttccttccctgcctaggacgaccttacagcccatgatcgcttttcttcttcttcttctttttgttttttcttcctgttttctttttaagtactacagtgaccccttatttattcagcaaagaaatggactactccacagtagtgaattttcaaaataatgcccttcaagcactaaaactttaaacaacacatcttcaaaacagctttgctgaggtataactgacacactataaacggcatggatttaaagtgtacaacttgatatgttttgatatatggacacacccatgaaaccatcaccacaatcaagataatgaacatgtccatcattcccaaaagtttcctcccgcccctccctgcccccttccccaagcaagcactgatctgttttccaaatacgtctttaatgctacaagggctcacacacctccccaccttagaaaatggagtatgatcaacatgattgatcctttccttgattcagcattatcaccaacacgatggaaagtgatctcagatgtcatgaggatgcatgattgtttgccctgatcactaaacggcccattgttgtgctggcatactgggcagtttcaagtttgggagttttctccctcactgctagctgtctcagagcttagttcccagcagacaactcttgctgcctcgaaccctggcacactaaccaccatcctgtgacgttcccactcctcattctgcgacagtggttctttgctgggagagatttttgtctcccaagggacatttggcaatacctggagatctttttggttgtcatcatgggagcgggaatgctactagcagctaatgtttagtgactagggatgcgactgaacatcctgcaatgtagagtgcagtgtcccctacagagaattatccgacccaagatgttgataatgccaaggttgagaaaccctgttcaggatgacaaactgattgaaaactcaacaaggggaccgggcgtggtggctcacgcctaataatcccagcacttagggaggccgaggtgggtgtatcacttaaggtcaggagtgcgagaccagcctggccaacatggcaaaaccccatctctactaaaaatacaaaaaaaaaaaaaaaaaatacgagtggcgtaagcctgtaatcccagctacttgggaggctgaagcatgagaatcgcctgaacccagaaggcagaggttgcagtgagctgtgatcaggccattgcattccagcctgggcaacagagcgagactcttgtctagaaaaaaaaaaaaaaaacccataaaacaaacaaacaaaaaaaactatgaggattgagtgattcacatttctgaatcgagagagagaaggatgggcagcaggcttgttgaagctggaaggccagggaggtcgcagactgaggaagaccctggtgtgtcccaggtacctccatgcaaccctactagagaggtggtctctggcttcctatggacaagctctaagggacccagctatgggcaccagagcccagcgttcagcagctgctcaatgaatgtctgccaggcgagactgcacccaaagcatttattaggtacataattgtggcagcactggctggccatggaaggcaaggcagaacacaaggagctggagctggcggaaggaagtcattaagtcagccagtggctgggatgcagcaaagccaggcagaaggtaagtgcagactcaccccaataaatgaggaaaatgagaagggctggctggccatgttaggatccagttccagtgcgaccagatatgtcaccaccacatcacttttagctcctccccccacccacagacaccctgtttgcctgtcatataaagaaggttttcccaaagtggtttagccagaactggaagggccccgccctgtgaagggataggagcctgactgttgcagctgcagtgagtggcggggaagcagcagcggccaggatgaatcccaggtgctctggagctggatggtgaagtatggacatgctttattcgattttgcattgacttaaaggtttaattattttaggagttcttgtagacattcctgaaaaatgcaggtaggcaaaaagaagaaaacaaagatcgcaaatgtgaccctttcattcggagagaacaccaatggaattttgttgtgcacccttctatgcacgtctgaatgttgtgtagacattctgcttacaactaggtgtgggtgctgctgccgaaggctttatttgctgtgcctgaggtggaccagagatttcagagaagactcccagagcaccccaaggagacaacaggagtgcttggagtcaggatgactgggtggatttaggactatgtgattctcaggagcctctctggattagccccaaatcaaggataaagagaggcctagctggactcttcctcccagagccctgctgggaaaatggagcccctttacagcccccacttacccatcaggccctgctcctctcactcatctccagacttctgtcacatgcccaagtcctgctaactgctgtgtaaaactggtaaggtgggatccagaggaccttgggcccctagggccccaggtcaggagacctggcctccagggccagttgagagtgataaagagaacaatacctgcccacaggacttgttgcaatgagataaaggcagaagtcaccagttgtggtcaaatgggatttttttccagagaagtctcacagagagtggctttcaaattctttttagcagcagaattgttgtaaaatacaatctcatgtgaaaccctaaaatgtgagacactctgggtgaagcagagagaggtgctcaactgcccaatcctgtcctcattcctccctctcagggaggcacctctgagaacccactttaaagaattttgccttatgccaaaggcaggattgaagaggcaagctggctggaagaaactgggaagctccacttcccaccgcctctgcctgggtggcagtcatctgagcctaggctagcccctccccctccaaagacccactgcgggctcccctggggccagcctccaggatgggtggggcacctgaagcagcaagtattgctatttttctgggctgacctttcttctaggcctgaggacaagtgggtaggtggggccagccctgtccctgtttcccctcaatggagttctcttgctcacagcctaaggaagaagcgtgagtcacttcctgcctcagtctgactgctggagtattgttctcccaactgtggctggcgctacccagtgtggcccctacaagtcttagttccttggcggaggggaagtccccactttgggacaaggccaactggacttatcttcccgctcaactttgaggacccagcattgttcctccagtttccagttcttgcagtgtttgtaaaggtgcccgaatcgtacctgatcccattcactaaatattatctccattttatagaggggtaaattgaggaagtccctgagaaattaacttgtctaaggtgtcccagcaaaaaatagtgccccagggatttgaaccggtttgctgattgatttttcaccagttgccttaagaattatcatgatttaacctctctgggcctcagtttcctcctctataaaatgcagacagtgatacatcaaaggtacttaaaggaaaatgtactgtacccacctcatggggcatgtggtgaggataaacggttgacacagaaaagagctctcaatggtgcctggctcatagaaaacactcagtggattttttttttcccattacccgggaacctgtgttaaggaggccacaggctgatcctgtgcagccaggttatctcacagggagcgagaagagatgggcacaggctactctgcgaccttggaataacccagcctgggaagctcctggccacattttccttcttttctttctcagctcaagcagcgtcggcctcagccaagtagcacaaacgtttctagggcccagggagggagaggctccggctggtatattgcaagtagcttggattcaggctctgccaaacaccccagtctcttgcaggatctgaggtctgctggttgtgggactttgcgcaaattatttaaacgttgtgcgcctcagtttccttatctgtaaaatgggattaataatctcagcctgaaaggattatgtggattaaatcatgtacataagaaggagataatgtaaagtgactggcctggtgcctggcaagcggttggtgtctaaaaagaaaaaaaagctaaaaatattaaaaggaggtgggctacttctgctcatatatccacctgtctatacaaatgcagacgaagtcgtgactcctctaacagtaggccaagaggaggctggtcctgccgccgtgcagtcctccctcgacctgggagtggaggacccaggtccgccgtccctgggcacttaacccggtcaggctcaaattcgtcgcccaggagtggggaagcgggggacggagagggccagtcccccaagagtccggctgaggcagggctcggagtgcctcccccaagcctttccctttggttccgagttcgggtctccgcggccgtcttcccggggagctcgcggggcgaagagccgagcccgggggcgggggcacggcagcggggcctgagggacgcgccgggcggccgcgaggactttgggatcgcctgccccacttcctacctgcccctaccaggagccggaggcagcgggcgccccagaaggccccgcagggccgccgcgcggggccggacgcgctggggcccacggcgctgggaacgcgggcccgcagtcgggcccgggcggcatgggcggcgggcggacgagccggagccggcggtggtggcggcggcggcggccggggaagcgcggaggtggcgccgcgagggggaggggcgcggcggcggaggaggaggagcccgggccgctgccgccgccgccgccgccgccgctgacaccggcccgagtaaacaagccgcgccgccgcggcccggccgctgcccccgcccgcgccggagctggagcccaggccgagccctgccctggtcgccggccgggccgaggccgcgcgccggcctccccgcctccgcgccgtgacgctgccgccgggcgcggggaccgccgccgagcccaggcccccgccgccgggctctccgctcggccgaggggcgcccgagccgccgcggcggtcgcctggaaaagtttccccgccaggctccccagggtaagtagcgagggcgcggggcccggggcccggggaaggcaagcgcgtctgggagccgggcccgaggggagccggccgggccgggccgtggagctctgccccaggagcgggctccgcggcccgggtgctcgggccggggagggtcggggcactggcgccggtgcagccctgacccgggtcccccggggcccggctgcccgccggctttccggaactggccccggggccggccccgagggtggagctgccgggagcagacagggcgctccgcagcccacctgagcgcgccgggcccgtctcggccccccggccgtggctggtacttttccgcgtggggccagggcgagccctctgacctcaggaagcgcctgcggggcccctgctgggggcgggatggggagaaaattccgcaggcgccgggtgctccagcctccccgccgccaccgggctgccgccggctcgcccactccgcggccgaggagggcctcgttccgcccggggaggggaggagcggccgggggcgaggcgggggctccttcgcttgggcctcgcccccgcccgcacacctgtgcggccaggactcgggtgcgggatccgcgggcgccggcggccggcgcaggtaggtccctgggctgccttctgccgcggcctggccgaggcccctgtgcccccgctgtgtggctggaccaaggggcggcctgcttgccagacaggtctgacggcagtcacttgtctggtcagaaccccgctttcccatcatcctctaccccctggcccctggggtgcagaccctcatccaccggagagtgttgggattcctattctgacttgggaagtgcgaggagaacccgggtgatatggcctggtgagggcgggtgctgagcaggtgtggacacagcataggagattagccaagcctgacctcttctcaagcagggcagccctcgttttactatttcctatattgggcttctacggagcatttgatttttaaaaaggattctgtggctttttaaaaagtttgaaagccgctggtccagcagtttttaccaccaaggaaactgaggcccagggagaggaagtgacttgttaagatcatccagcaaatagtgggcagggactgggagcgataaattcacgggagcctcccagggctggtaacaggaccccgcgtggtgtctctgctagagggagagactgattgggtgtccgagtggccctcccgtggcctgctctgtggctgtgtcagagccagacccccagtgtctgggaaacagcagtcggtcctggggtgaggcgcaatttgagtggcccagagtggctctctgtgtcaggaggttctggtgctggagaaaaggctttgcccaagaacacagccaggaagagcacccacagctctctctggccacagcctggaacagagtcccatgtgaaacaagaccatgagaaatacagcaagcctccaggtttgagacaaactgggactagagggtgagtcagagtctgggatgggggtggggagaaacccattcattcattgttttcagttcttactcttttcggggatcctcccttgtcccacatgctgtgcagagccgtctgtgggggtctcattttctggaagccatccccacccctcaccatggctggggttgttggatagagggaggctggccctctttctttggggggactgttcagttgcgcctgaagcctgctttctttccgagtgctgcaaggtaattaaatagttggttaatcacttttaacgccaaacagctgcggctccatctacagtgtgctggaatctgggctagacccagatgaacccagcctcgatttgggggctccagcaggactcacagcacggtggttggtggtggtgggggcaggggggtggttgcatgacatctggacccaagaggcagctgttgtggcagcaagagagaggagagagatgaggccccgttcctatatggctctgctcccagggtcccacatcctctgttaaatgagggacttggggtggggggggcggtccttccatcccctagggctggggcgcctagctgcccagccattgatcaggccagctttctggaaccaaccacccaaagcaccatggggctgtggttccgaggcctgccctggaagtcctgtggagtctgcccgcagggatgtgcaggagctgtattgtagatgtctcctgccatcagctgtcaggttattttggtccaaactgaaaatactccaggaattgtgtgtggagtacccccagcctgcagcagtcagggaggccggttgtgtctaagggcagcttctggagaagcaaggagttttctgtggtgagcctgcctctctagctccccagggcctacgtgagctggggtgccttccttttggtatccggcagagtggccttggctatggaagtgctaagggcatccagggccctgctgctgctcagggagcttggcactgatatgggatacccccagcagcactgctgggacctcccctagcttcccccccttcctccagggccttggcttctggctagtcaggggcactatgtggggacagttatgtggccccgggcagagagaggtcccgccgtctgtttgctgaaggaggaaaaacaacactcggactattgattcagtctcaccttggcgctcctggctcagcagccagtgtttgccctggctgcctgggctcggattacgcaaggctggtgggcgtggagcaagcaagggggcagctgggggcctccaggcccaggcagggcagggcttggcggccccagcgttccccaggaaactgtaaaaacgagtctggggccctgactttgctgatagcggccatctcagccatagagggaggtgaagcctctgtgatctccacccccgcaccccctcaggacatggcccctaaaagcaccatcccatttagggtcacccattttcttcctaggagctgtggggctttgcgaataactccctatggctgaatctgctttgctgaactaggaaaccctagtgagttgtatagatgccattcatttaagaaccttgaaaagccaacatcttattcccatgtaaaacatacctaggtgatttggagaatacagtgacacaaagaagaaaataacaattacttgtaattctcaccatcttgagagaaccaccgttaacattttttagcgtgtgtatccttccagatttcgctttagtttgtataaatatacatgtataaatagtttttaaaaaataaaatgggattatgtgtacatactgctttataatgcatcttctttaccttgatcatggtgaacatttattcatttgttgtttctgattttgagtgactcagggcttgatagtcttcatcctgcttcttctgttacactttttttttttttttttttttgagagggagtatcgtactgtcgcacagactgggaatgcagtggcgcgatcttggctcactgcaacctccacctcctgggctcaagcaattcttgtgcctcagcctcccaagttgctggcactacaagcacccgccaccacacttggctcatgtttgtatttttagtagagacgaggttgcaccatgttggccaggctggcctcgaactcctgacctcaggtgatccacccgcctcagcctcccaaagtgctggatgacagaagtgagccaccatgcctggcccttctgttacatttcttatattcttgcatggagaaaggattgggggggattgtgagggcatccatctgtccatctatgtggctggccttgggggctagatttcttctggggaggactaatttttttacccttctcccccagatctcatttcaggccccaattgaaacttggggtgggcagggcagctttagtgcgtagcaggggaggaactgaccctctctccccttttcccctcttgttcctctcagggtcggcactcttcaccctcccgagccctgcccgtctcggccccatgcccccaccagtcagccccgggccacaggcagtgagcaggcacctgggagccgaggccctgtgaccaggccaaggagacgggcgctccagggtcccagccacctgtcccccccatggagctgaggccctggttgctatgggtggtagcagcaacaggaaccttggtcctgctagcagctgatgctcagggccagaaggtcttcaccaacacgtgggctgtgcgcatccctggaggcccagcggtggccaacagtgtggcacggaagcatgggttcctcaacctgggccaggtaggtgttcccccacaggacactgccagggggtgggaccagagaagacagggattctgggagcaggagctgttggccttgtttgctcaggggcatctgggtagccggcatgttctgggtggccatgagcaaagcacaggtggttcaggcaagcagcatatcccagtgagagtgagtcctcatggtccccgcattttgctgggtcccggacagggagcagatgccccgcacccccgaccgtggcgagcctcccatgaagccgttgtccacccccgtcccccgcctccccggggactgacagatggaaagcccagctcagtctccctgctctattgcagatcttcggggactattaccacttctggcatcgaggagtgacgaagcggtccctgtcgcctcaccgcccgcggcacagccggctgcagagggagcctcaagtgagtgtggccccagccccctcctgctgccaccctccccctcctgctctcaggagcccctctcgcctcctgctccacccacaccatctctccctcactcccccacaggtacagtggctggaacagcaggtggcaaagcgacggactaaacgggacgtgtaccaggagcccacagaccccaagtttcctcagcagtggtacctggtacgtggccttcttcgctgctgggacctcctccccagatgcaccatccacccactatgagctcttggatggaggaggctgtcttcgaggcctcctctgattcgtttcctttcctcctgctgggcagtctctccttggcccatcctaataagcaagcctgggggtggccctcccagagtcctctacattcccatggagtccagacagccagtggcggcctttcaggagcagggatggtacaggaggaggttttacgggggcaaagggattcttcaagatgctcctagcctcacaaaaccaatcatgtctcataagtgatggggtgggtgtctccacagtctggtgtcactcagcgggacctgaatgtgaaggcggcctgggcgcagggctacacagggcacggcattgtggtctccattctggacgatggcatcgagaagaaccacccggacttggcaggcaattatgtgaggaagtcggggagggaggccgtgatccctgctgaggtgtgtctagaggctgtcttgttctatcagtgaggtcagccttctcctgatggtggccaaatccttcttaggatcctggggccagttttgatgtcaatgaccaggaccctgacccccagcctcggtacacacagatgaatgacaacaggtaagaagtggcaggccccggtctctgcctcccttctcctttcttccactaaggaacagggctgagcctgggtgagatgtgccttgcctaaaaggctgaggcttttcccacagtcctggcccacctggggctctgagggagggctcggtcagagtggagatggccacaggcccagtggagtgtgggagatgggggctgggtactcaggggatgatgggtgtcggatgtgcggatccctcgtgctcctcaggccacatctgccgggccctgttcaccccatttgttctactcatgctacgtgcttggccctggcaggcacggcacacggtgtgcgggggaagtggctgcggtggccaacaacggtgtctgtggtgtaggtgtggcctacaacgcccgcattggaggtgagtgtgggcctgggccaccctgtcttcaggagggcccttcagtggaatttttcccgcccacttcccatctggccaatgcctgccactttccgactgtggatcctttgatcacgtggctgttccacggagggttcccaaagggtcaaagactgaaagagctggacccctgtggagtgagggtttcctagcaggagtctcctgaaatcctcacgacccactgtgagtcctcacgtggcagatccttgatcaccaggctcttttgggaaccagagactctttctagtcctgaatgtgtggttgggggcaggaggtgttctctttttccttctctgggtcttgtctttgaaaggcagaggcaaacaggtagttgggggttcagggtttctcagcatcagcctccacccttcccttactcatcccctggggtgcagggccgggtgtgctccttggggtgggggccctgacagctggacccatgcagcatccctcttcgtgcccccccttcacggccaggggtgcgcatgctggatggcgaggtgacagatgcagtggaggcacgctcgctgggcctgaaccccaaccacatccacatctacagtgccagctggggccccgaggatgacggcaagacagtggatgggccagcccgcctcgccgaggaggccttcttccgtggggttagccaggtgaggtggggatctgtccagcccctgcgggcaggttgggtgctgtcttccgtacctatcttgtgttttttggtttgttttatttattctcatgtttaactttacacaaagcatgtttattgaaacattaagggacagaagaagagtagagtgcatataccacttggacttgcctaattaaaaaacacattttttttagaaatgaggtcttgctgtgttacccaggctggtctcaaactcctggcctcaagcgatcctcccgccttggcctcttggtctgattttttgtgtgcctagatagacatatttggatacatacttgatccaccagggatc

SEQ ID NO: 450 - DNA, 349 bp, Homo Sapiens
actcattcgaagtgccatcgaagaatattcagcaacacagaaaaataagtgaaacaatatctaggaatgtgtgcatatatgtacacacccatgtatacatgtgtgaacgtagatagtcatggcccaaaaatggctgggatgctggtggtaactacctcatggatggttaaatttgggattgtttaaattttttctttatacttccctggagtttccaaacttataacaaacaagcattgcttttataataataattttttataaaagtgttactttgaaggaaacattctgtaaactcaaggaaattcagaaggtgctccaaaactgttttgcctggcggcccatctgg

SEQ ID NO: 451 - DNA, 2229 bp, Homo Sapiens
agttaaaacagctgagcttctgaatgcctgcaagaagctgccctttgaaattaagaacttcgtgaagaaaacagaggctcttcggttgcagtatcgctacttagacttgcgtagtttccaaatgcagtataacctgcgactgaggtcccagatggtcatgaaaatgcgggaatatctctgtaatctgcatgggtttgtggatatagaaacccccacattgtttaagaggaccccagggggtgccaaagagtttttagtaccatccagggaacctggaaagttttgttctctccctcagagtcctcaacagtttaagcaacttctgatggttggcggtttagacagatattttcaggttgcccgatgttatcgagatgaaggttcaagaccagacagacagcctgagtttactcagattgacatagagatgtcatttgtagaccagactgggatccagagtttaattgagggtttgctccagtattcctggcccaatgacaaagatcctgtggttgttccttttcctactatgacttttgctgaggtgctggccacctatggaactgataaacctgacactcgctttggaatgaagattatagatatcagtgatgtgtttagaaacacagagattggatttcttcaagatgcacttagtaagccccatggaactgtgaaagccatatgtatccctgaaggagcaaaatacttaaaaaggaaagacattgaatccattagaaactttgcagctgaccattttaatcaggaaatcttacctgtattccttaacgccaatagaaactggaattctccagttgctaatttcataatggagtcacaaagactggaattaatcagactaatggagacccaagaggaagatgtggtcctactaactgctggagagcacaataaagcatgctctttgttaggaaaattacgactggaatgtgctgaccttctagaaacaagaggagtggtgctccgtgaccccactctgttctctttcctttgggtggtagatttcccactcttcctgcccaaggaggaaagtcccagagagctggaatcggcccaccacccatttactgctccccaccccagtgacatacatctcctgtacactgagcccaaaaaggcccgtagccaacactatgacttggttttaaatggcaatgaaataggaggtggttcaattcgaattcacaatgcagagctgcagcgttatatcctggcaaccttactaaaggaggatgtgaaaatgctctcccatctgctccaggctttagattatggggcaccccctcatggaggaattgccttagggttagacagactgatatgccttgtcactggatctccaagcatcagagatgtcatagccttcccaaagtccttccggggacatgacctcatgagcaataccccagattctgtccctcctgaggaactgaagccctatcatatccgagtctccaagccaacagactccaaagcagaaagagctcattgaatcatgcataccatgcagaaagttgagcttttaggttttgtcctctttgcttccccaaggctaaagtcagatctagagttctgccacaggtctaacaatcaagtctttagatggaaggaatccaggcaacattcttcaccacaacgaagaaacagataaaagatacccaattttgacttgatttcatgcatcatttggattttttttggttaggactttttttgaagttcctttttacttaggtgtgaaagatggttctttgttgaaataatatagtggtttagtgttttcaaatcatgtttctcatacccagatagtagattattcacttaggacagaggtaatcaaattatgtgtgaaatgtaggaaaatgcttgcccctgtaaactagtgagttgatggagcatttgcttcatcatcctcatcaagagaatcatataaattaagctttataatgacatttcaaccatcaacataatatagtgaggagtagcataatattttttaataatgcagaaaacatcactgaaatgagagtcacaaatttttcttcagtgtttcagcctgagtaagttacataaacctcgcttagcctcccttcctgctaatgtgtaaaatacatacttgccctggctacctcaccgggctgttattgctggaatcagaggagataacatatatggaagataaagtgaataaaagtactttgaaaaact

SEQ ID NO: 452 - DNA, 541 bp, Homo Sapiens
tactggtttctcaattattgtcccagtcaggcaagggttacttttttttttgagagacagggtctcactacattgccagactggagtacagcggcagtttaccatcactgcacttacaaacctccaactcctggtgctcaagccatcttcctgactcagcctctcaaatacctcaaaggactaccggagctccccatgcatcgcgcttttttctactttttcgtaagctattggtttcaccagaggtgtggtgttttttttttttttcatcacttaagctttaggcccctgccaagcccttgtacctgattttataatttcctacctgtgtaattagagaaagctataaatgtgtaggcttcaaacccacaaaacctgtgtttgcctctgctcctaataaggctgtcctcaaggtaagcctttttatctcgttccaaatctctcatgtcccacgtcattaatcatacaattccctgtcagttctaattacctttgtataacacctcaagtatgttctgtgcctagaactctcaggaagtaa

SEQ ID NO: 453 - DNA, 390 bp, Homo Sapiens
  misc_feature (45)..(45): n is a, c, g, or t
  misc_feature (183)..(183): n is a, c, g, or t
  misc_feature (265)..(265): n is a, c, g, or t
  misc_feature (319)..(319): n is a, c, g, or t
  misc_feature (345)..(345): n is a, c, g, or t
gggacgtgcattgccgctgccggcatggacaacacagtgaaggtntgggacgtgcggactcaccggctgctgcagcattatcagttgcacagtgcagcagtgaacgggctctctttccacccgtcgggaaactacctgatcacagcctccagtgactcaaccctgaagatcctggacctgatngagggccggctgctctacacactccacgggcatcagggaccagccaccactgttgccttttcaagaacgggggagtattttncttctggaggctctgatgaacaagtgatggtttggaagagtaactttgatattnttgatcatggagaagtcacgaaagtnccgaggcccccagccacactggccagctccatggggaatctgcca

SEQ ID NO: 454 - DNA, 1195 bp, Homo Sapiens
cacgaggcggattcttggcgccggagaagaggcagggtcaccctctctccacgtcagagacctgactgtggagatggcggctcagaagataaacgaggggctggaacacctcgccaaagcagagaaatacctgaaaactggttttttaaaatggaagccagattatgacagtgccgcttctgaatatggaaaagcagctgttgcttttaaaaatgccaaacagtttgagcaagcaaaagatgcctgcctgagggaagctgttgcccatgaaaataatagggctctttttcatgctgccaaagcttatgagcaagctggaatgatgttgaaggagatgcagaaactaccagaggccgttcagctaattgagaaggccagcatgatgtatctagaaaacggcaccccagacacagcagccatggctttggagcgagctggaaagcttatagaaaatgttgatccagagaaggctgtacagttatatcaacagacagctaatgtgtttgaaaatgaagaacgcttacgacaggcagttgaattactaggaaaagcctccagactactagtacgaggacgtaggtttgatgaggcggcactctctattcagaaagaaaaaaatatttataaggaaattgagaattatccaacttgttataagaaaacaattgctcaagtcttagttcatctacacagaaatgactatgtagctgcagaaagatgtgtccgggagagctatagcatccctgggttcaatggcagtgaagactgtgctgccctggaacagcttcttgaaggttatgaccagcaagaccaagatcaggtgtcagatgtctgcaactcaccgcttttcaagtacatggacaatgattatgctaagctgggcctgagtttggtggttccaggagggggaatcaagaagaaatcacctgcaacaccacaggccaagcctgatggtgtcactgccacggctgctgatgaagaggaagatgaatactcaggaggactatgctagtattttgcttgctgaaaagaaaagggaaacaaaggtaaaatcctgacatgccatttcaaggacttgggaatagattagggatatccgtacttcattacagtcatgattttggatcctaataaagactagtttttagttaccatcttcccaaatcaaaaaaaaaaaaaaaaaaaaaaaaaaaaa

SEQ ID NO: 455 - DNA, 267 bp, Homo Sapiens
  misc_feature (230)..(230): n is a, c, g, or t
tatacggctgcgagaagacgacagaagggacttggtgttgcttggaaggcatccatacctgcattttgcattcttcgtatgtaatcatattgccaaagacaaactatttcatcatttattgtaaataacacttttccccagacctaccataaagtttctgtgatgtattgtcttccagttgcaataaaaattactgagttgcatcaattgaagaaaaaaaaaaaaaatanaaaaaaaaaaaaaaaaaaaaaaaaaaagtcgtatcga

SEQ ID NO: 456 - DNA, 3000 bp, Homo Sapiens
caggccacaccggtggtctgggctggggaccgcgggtcgggtccggtttccagggggttcctggtgctcgaggctggcggcgaggaaggaccagatggcctttgaggatgtggctgtgtacttctcccaggaggagtgggggctcctggacacagcccagagggccctgtaccgccgcgtgatgctagacaacttcgcacttgtggcctcgctgggactctccacctctcgacctcgtgtggtcatccaactggagcgtggcgaggagccctgggttcccagtggaacggacacaaccctgtccaggaccacctacaggaggcgcaaccctggttcctggagtttgacagaggatagagatgtttctggagaatggccacgagctttcccagataccccacctgggatgactactagcgtcttccctgttgccggtgcctgccacagtgtaaaaagcctgcagagacaacggggtgcctccccatctcgggagagaaaacccacgggggtgtcggtgatctactgggagaggctcctgctaggctcaggcagtgggcaagccagcgtcagcctgcgactgacctccccgcttaggcctcccgagggcgtccggcttagggaaaagacactcacagagcatgcgttgctggggaggcagcccaggacgcctgagcggcagaaaccatgtgcacaggaggtccctgggagaacctttgggagcgcccaggacctggaggctgccggcggtcggggacatcaccgaatgggtgcagtttggcaggagcctcatagactcctcggtggccaggagccctcgacctgggacgagctgggcgaggctcttcacgctggggagaagtccttcgaatgcagggcgtgcagcaaagtgttcgtgaagagctccgacctcctcaagcacctacgcacccacaccggggagcggccctacgagtgcgcccagtgcggcaaggccttcagccagacgtcgcacttgacgcagcaccagcgcatccacagcggcgagacgccctacgcgtgccccgtgtgcggcaaggccttccggcatagctcctcgctggtgcggcaccagcgcatccacacggccgagaagtccttccgctgctccgagtgcggcaaggccttcagccacggctccaacctcagccagcaccgcaagatccacgcgggtgggcgtccttatgcttgcgcacagtgtggccgccgcttctgccgcaactcgcacctgatccagcacgagcgtacgcacacaggcgagaagcccttcgtgtgcgcgctctgcggtgctgccttcagccagggctcctcgctctttaagcaccagcgcgtgcacacaggcgagaagcccttcgcctgcccacagtgcggccgcgcctttagccacagctccaacctcacccagcaccagctcctgcacacgggcgagcggcccttccgctgcgtggactgtggcaaggccttcgccaagggcgccgtgctgctcagccaccggcgcattcacacgggcgagaagcccttcgtgtgtacgcagtgtggccgcgccttccgtgagcgcccggccctcttccaccaccagaggatccataccggcgagaagaccgtccggcgatccagggccagcctgcacccccaggccaggtctgttgccggggcatcatcagaaggtgcgccagcgaaggaaaccgagcccactcccgcctcgggcccagccgccgtctcgcagccagcggaggtctgaggtcacaggttgcagccctggccttctgtgaatcccttccacagctaaagggcatatgtcctctgcagatccacagcagagaaaaagtcccgtgcttgctagtcagggacaagggaggccctttggctgtgatttcatttgcacgtggggacaggatttgccagttcacccacagatcacacctccatccccaaagaggtagcactgcagcaacatcagggggaggacgtggtggctgaactctagtggggccgagactattcagagccagtaggaggccgacagtcacagcactgcactgtggtgcggcttcatgtgatatgacagtggatgctaaggtgagagggatgcaggcatgggttgggggtggcccagagaaacttatgacagctgtacacaaactggccgctggagagatgcccgctgagggtattctcccctcaacccactgcctctgttcatccaagacttcctaggggccagcctagcagacaagagaccacaagggactggggatcagggtctgggctctgtcagccgccacctctgggaaagagaaaaggtttgggtccactgaacatcatgtttgtagacgctgacaggtggggtcctaatgagagccaacacatgctcactgccagctcctgtcctgagtactgggaagtttctcctgaagccctgtgagatggctctgtggctggtatcccgacttggaagatgaggaaactgaggcacacggcctggcctggcttcacacacatagccgactcaggagagggatgcccatgggggaacatgtgactctcagcattggaaggacagagctaggatgatggctttccggtggcactcgttcaggtttttgcccaagtctcagcttggccaaggcctgtcactgactggtttaccaaagtcgatgtgaggaggaggctttatacctgaggggatgatgttaacttcagacaagatggagctgctcacttttgccgggtttggtggccacttcacccccaaccctgtctcacccccattatccctcctcaattggaggctggacagagctgaataggaaagacttgctattgcctaaggctatgtgtgacaccctcctgaggacctccccaccccagtgtaatggcccttcatggcagggacagaaaggtggactgggggccatttgcttcctgtggccttcagcagaccaggccctgtccctacctggagcctcacctccaaggaaattc

SEQ ID NO: 457 - DNA, 303 bp, Homo Sapiens
  misc_feature (224)..(224): n is a, c, g, or t
  misc_feature (270)..(270): n is a, c, g, or t
  misc_feature (284)..(284): n is a, c, g, or t
tgatttatttctgcaaattgaataaattcttaattttctgcatgcacataatacaaaaggtattttcatagttttggatttataccaaatgaaaaggattctcttgatgaggcacctttaactgatttttctgttaaagttttaacaatttgttcttgggaaggtcagttcgtgaagggcaagtttgtcagtattttcacaaaactatttcaggctggaatccnggaaaggtggaaacaggcaggattttgccattgttaaattgtgttnttaaattgggggcnttggaaatttccaaaatta

SEQ ID NO: 458 - DNA, 351 bp, Homo Sapiens
taaggctaggagtatgggaccaatctgggcaagatagcaagaccttgcctctacgagaaatttaaaaatttagccaggttatgtgccacactgccttgcctgggcactgatacctgaacgctgagtttgggcccgtggagatgaaccctttaactaaggtgaagctgatcaatgagctgaatgagcgagaggtccagcttggggtggccgataaggtgtcctggcactccgagtacaaggacagtgcctggatcttcctgggagggcttccttatgagctgactgaaggggacatcatctgtgtgttctcacagtatggggagattgttaacattaatctcatgtgggaca

SEQ ID NO: 459 - DNA, 6799 bp, Homo Sapiens
ctagatataatgggaggtgctttatagaaagtgcagcatatcctttgtctgattccaaacaaatgtagaagtctacgctagctagtagtaatggcagctgggaggtgcaggttctctccacccaggctcattttccacgctttgggtcatgggggacagctggtcctggactgtggcactaagaaagcatgactcctgccccgtcttcccttgaggggcagaacagggcagagtctgcacctgtgcccgtgcccagcatcacgcccaccccgctgcctttgcaggcacatggtgcttctgaaggagcagtacgggcagcaggtggtcgtgaaccttctgggaagcagaggcggagaggaggtgctcaacagagccttcaagaagctgctctgggcttcttgccacgcgggcgacacgcctatgatcaattttgacttccatcagtttgccaaaggtgggaagctagagaaattggagaccctcttgaggccacagttaaagctgcactgggaagacttcgatgtgttcacaaagggggagaacgtcagtccacggtgaggctcgctgcgcactgtgccgcgtcttctgctggggggaagcgtcagtccacgttttcagaaaggcactttgcggatgaactgtcttgactgcctggaccgaaccaacactgtgcagagcttcatcgcgctcgaggtcctgcatctgcagctcaagaccctggggctgagttcaaaacccatcgttgaccgctttgtggagtccttcaaagccatgtggtctctgaatggccacagcctgagcaaggtgttcacaggcagcagagccctggaagggaaggccaaggtggggaagctgaaggatggagcccggtccatgtctcgaaccatccagtccaacttcttcgacggggtgaagcaggaggccatcaagctgctgctggttggggacgtctacggcgaggaggtggcagacaaagggggcatgctgctggacagcacggcgctcctggtgactcccaggatcctgaaagctatgactgagcgtcagtccgaattcacaaatttcaagcggatccggattgctatggggacctggaacgtgaacggaggaaagcagttccggagcaacgtgctcaggacggcggagctgacagactggctgctcgactcgccccagctctcgggagctaccgactcccaggatgacagcagcccagctgacatatttgctgtggggtttgaagagatggtggaattgagcgcagggaatattgtcaatgccagtactaccaacaagaagatgtggggtgaacagcttcagaaagccatctcacgctctcatagatacattctgttgacttcggcacagctggtgggcgtctgtctttatatctttgtacgtccataccatgtcccgttcatcagggacgtagccatcgacacagtgaagacgggcatggggggcaaggcggggaacaagggcgccgtcggcatccgcttccagttccacagcaccagcttctgcttcatatgtagtcacctgacggccgggcagtcccaggtgaaggagcggaatgaagactacaaggagatcacccagaaactctgcttcccaatggggagaaatgttttttctcatgattatgtattttggtgtggcgatttcaactaccgcattgatcttacttatgaagaagtcttctattttgttaaacgccaagactggaagaaacttctggaatttgatcaactacagctacagaaatcaagtggaaaaatttttaaggactttcacgaaggagccattaactttggacccacctacaagtatgacgttggctcagccgcctacgatacaagcgacaaatgccgcacccccgcctggacagacagggtgctgtggtggaggaagaaacatccctttgataaaacagctggagaactcaaccttctagacagtgatctagatgttgacaccaaagtcagacacacctggtctcctggtgccctgcagtattatggtcgtgcggagctacaagcgtctgatcacagacctgtgctggcgatcgtggaggtggaagttcaggaagtcgatgtgggtgctcgggagagggttttccaggaagtgtcctccttccagggccccctggatgccactgttgtagtaaaccttcaatcaccgaccttagaagagaaaaacgagtttccagaggacctgcgtactgagctcatgcagaccttggggagttatgggacaattgttcttgtcaggatcaaccaagggcagatgctggtaacttttgcagacagtcactcggctctcagtgtcctggacgtggacggtatgaaggtgaaaggcagagcagtgaagattagaccgaagaccaaggactggctgaaaggtttgcgagaggagatcattcggaaacgagacagcatggcccccgtgtctcccactgccaactcctgtttgctggaggaaaactttgacttcacaagtttggactatgagtcagaaggggatattcttgaagacgatgaagactacttggtggatgaattcaatcagcctggggtctcggacagtgaactcgggggagacgacctctctgatgtccccggccccacagcactggctcctcccagcaagtcacctgctctcaccaaaaagaagcagcatccaacgtacaaagatgacgcggacctggtggagctcaagcgggagctggaagccgtcggggagttccgccaccgttctccgagcaggtctctgtcggtccccaaccggcctcggccacctcaaccccccgcagagacccccccctccaaccggtttaatggtgaaaaagtcggcttcagatgcgtccatctcctccggcacccatgggcagtattcaattttgcagacggcaagacttctaccaggagcacctcagcaacctcccaaggctcggactggaataagtaaaccttataatgtcaagcagatcaaaaccaccaatgcccaggaggcagaagcagcaaatccggtgtctcctggaagccagaggaggtgcctccgaagaagccctaagtgccgtggccccaagggaccttgaagcatcctctgaaccagagcccacaccgggggcagccaaaccagagaccccacaggcgcccccactccttccccgtcggcccccacccagagttcctgccatcaagaagccaaccttgagaaggacaggaaagcccctgtcaccggaagaacagtttgagcaacagactgtccattttacaatcgggcccccggagacaagcgttgaggcccctcctgtcgtgacagcccctcgagtccctcctgttcccaaaccaagaacatttcagcctgggaaagctgcagagaggccaagccacaggaagccagcatcagacgaagcccctcctggggcaggagcctctgtgccaccacctctggaggcgccgcctcttgtgcccaaggtacccccgaggaggaagaagtcagcccccgcagccttccacctgcaggtcctgcagagcaacagccagcttctccagggcctcacttacaatagcagtgacagcccctctgggcacccacctgcgcgggcaccgtcttcccacaaggggactttctcagcacttcatctgctacaagccccgacagcgatggcaccaaagcgatgaagccagaggcagccccacttcttggtgattatcaggaccccttctggaaccttcttcaccaccctaaactgttgaataacacttggctttctaagagctcagaccctttggactcaggaaccaggagccccaaaagagatcccatagacccagtgtcagctggcgcttcagctgccaaggcagagctgccaccagatcatgaacacaaaaccttaggtcactgggtgacaatcagtgaccaagaaaagaggacagcactgcaggtgtttgacccactggcaaaaacatgactgagcagctttgaaggctgcagtcctatagaatgcataccttcctccctctagacatccctccaccagaagagacatctatttaaaggcacactggccaaaacgtttgtgcatctgtcactctcgtgtagtttacaaaaatcgtgtctcttattcagtaagatggttactcagccaccaaaatatatttcactcaaggcttgtacatctgaagtttgctcttcaaggaatgggaaccttcctgttaaattcggtgtatggattttaagaaaggaatctagccaatgaggtccaagaagttctcacccattgaatttttaaatggctgttcagttcatgttgtacgtgatggagatttgtcttttgttttatttgcattttacagatttggtataacattttggggagccacctgaaggttgatgtataaagtaaggattagagaaagaggtcgttgtgaccattagtagctgtcctggcccacttaaacaaggttacaaaaaatcagagtcggaagcagccaaataggtcaacctaatgactagactgtacattcccatgagccttcatgtttaagtgtgtacatgtgcgttaaccttgatgatgcgtgaatcccgagggagccggtggcatacaccgttagcttaaccttagcttaaactagctgaaggctcctgtgccatgtcttagacattgcatgccctatcaattactataatcctgagccatggtgtgctactgaaaccaatttttatccaccatctagtccttattaaatgaaacctcacggatcctttgttccgcttatattccatgcataccacataaaagcacacagtgcgaaaactcttgctgatacgcgatattgattctcattgttagaatatggagagtgtttcagcctcgtctgtccggctggagcttcgggatggaaagtgctatgtgtccctgcatataagaatcaccaggccagtgtttctgggtttgcttgtctatatgtttgtctatattttttgcctatacatttttcccacgtttccaacagcacttctcacctattcaataactgaaaaagacattaccatagtgctttacatttttaaagtaatgttacaaggtctggaatccatttggagcagataccgtgttttcgctatttaataagaagttcagtagtgaaatcttactgtaccgcctgttgtatctgggagcctcgtacagaggctcgcacagcagtgatcaggtgtcatcccttacgtgactgggggatgtctgtcctaaaagctgactgctaggatagtaaggatcatcttgcctgggctatgccactgtcttgttaccaattagacatctggaatttcataattagttttcattgtcactgtcaagatatattgcagattacttaaatatggccatcaaaacaaaagttacaacacgtatctcttttcatctgaaaactaatacctggaaaaggataaaaaaaaaaaaaggaatccgtgacccacagagctagacagataagatgcatagttgaccagtcataaaaggcggtgtttaggtgatcaggatgccgttggtggcatttacgtgctttatatgatttttacctccgtaacaaacacaagaaataaacagaatggtccttaacagagtttgggggagagagcaagatgggttccttggagaagctgatttgccaagatgcacatcgctattaacagccagagtcataaatgaaatgaaattgaagaattcattcaaatgctcttttccctataacctcttttctcaccaaaaaggagataaatttgaaaacagataaatgtaacaaccagtcaaagaagcaggggaaaagtaagctcctccaaagttgcttgcagtgctggaaatagatctcatttttaggttttctcttcgttccagataccaaataaatgggacagagaataaaatttttgttaaaatatgtgctcatctcctaagtagctcttcagagtctgaccgtaagtaaaaacacacagaattgtgttgactgggggaggtgaatcacaaaaaagttacgaggagtttaagagttaaatattatttgatcgtggctgtcaaatttagtgaacaacatagattggatttggagttggtagtaggtatggttctcataccagaattctcttaaaaaaaaaaaaaaggacaattggaattgccttatttatttttaaaatcaatgcttactagttggtaggattcccaggtcagcagcagggttgattaaataatcttgacaatgagcagctgccatcttgggggattttcattctgtggttttttaaatgtttcgtctttgatgctaccatccagggcttcttattgtgaccttgtagcctattttgttcctgctgttctctaacatggtgcagttcacgcagactggtttaggtacttcacaactcaccattgtctctctgaccccaagcctagtcccttttacatcaccatcttctcagacttcttgcctattcttaaaatatgttttggttaatgattgaattaggacatcagcttaagcaattcctgtaacggtttaacgttgttgaagttcaaggcacataataaaattctccctgatgtgtgtgtaagtataaacaaagtaatgtatcaaagcgttcactttataatgaagtcatttcattgggaaggaaagctgcaaagattattgggggactagtgattaataaaatcctgtaatatttttgaagtgaaaatttgtactgaaattgtacatgatacctattaaatgtttttgtcttttttcaaaaaaaaaaa

SEQ ID NO: 460 - DNA, 462 bp, Homo Sapiens
ctagaggattcccctcgaattcgacggtttctctatcagtcgcgcagctgtgttcgcggactcaggtggaaggaatttcttctcttcgttgacgttgctggtgttcactgtttggaattagtcaagtttcgggaatcaccgtcgctgccatcaacatgtcggtcccaagcgctctcatgaagcaaccgcccattcagtctacggctggggccgtcccagttcgcaatgagaaaggtgagatttcaatggaaaaagtgaaggtaaagcgttatgtgtccggaaaaaggccagactatgcccctatggagtcctcagatgaggaggatgaagaatttcagtccattaagaaagccaaagaacaagaagcagagcctgaggaacaggaggaggattcatccagtgacccccggctacggcgtctacagaacccgtattagtgaagatgtggcacagagattggct

SEQ ID NO: 461 - DNA, 294 bp, Homo Sapiens
  misc_feature (55)..(55): n is a, c, g, or t
  misc_feature (122)..(122): n is a, c, g, or t
  misc_feature (187)..(187): n is a, c, g, or t
agagtgggtggctgaagccatactattttatagaattaatggaaagcagaaaagncatcacaaaccaagaagaactttggaaaatgaagcctaggagaaatttagaagaagacgattatttncataaggacacgggagagaccagcatgctaaaaagacctatgcttttgcatttgcaccaaacagnccatgctgatgaatttgactgcccttcagaacttcagcacacacaggaactctttccacagtggcacttgccaattaaaatagctgctattatagcatctctgactt

SEQ ID NO: 462 - DNA, 2804 bp, Homo Sapiens
tcgcagagccgccgatgcgtgtccagtgacccggacagcaaggcccgcgcgcggcgggggcggcggcagacgcctggtcaccgtgaccccgattttggatttaccgcttgggggctggggggatcctggatttaactggcgactgttttgggggacgccggacgccatgttgtggaaaataaccgataatgtcaagtacgaagaggactgcgaggatcgccacgacgggagcagcaatgggaatccgcgggtcccccacctctcctccgccgggcagcacctctacagccccgcgccacccctctcccacactggagtcgccgaatatcagccgccaccctactttccccctccctaccagcagctggcctactcccagtcggccgacccctactcgcatctgggggaagcgtacgccgccgccatcaaccccctgcaccagccggcgcccacaggcagccagcagcaggcctggcccggccgccagagccaggagggagcggggctgccctcgcaccacgggcgcccggccggcctactgccccacctctccgggctggaggcgggcgcggtgagcgcccgcagggatgcctaccgccgctccgacctgctgctgccccacgcacacgccctggatgccgcgggcctggccgagaacctggggctccacgacatgcctcaccagatggacgaggtgcagaatgtcgacgaccagcacctgttgctgcacgatcagacagtcattcgcaaaggtcccatttccatgaccaagaaccctctgaacctcccctgtcagaaggagctggtgggggccgtaatgaaccccactgaggtcttctgctcagtccctggaagattgtcgctcctcagctctacgtctaaatacaaagtgacagtggctgaagtacagaggcgactgtccccacctgaatgcttaaatgcctcgttactgggaggtgttctcagaagagccaaatcgaaaaatggaggccggtccttgcgggagaagttggacaagatcgggttgaatcttccggccgggaggcggaaagccgctcatgtgactctcctgacatccttagtagaaggtgaagctgttcatttggctagggactttgcctatgtctgtgaagccgaatttcctagtaaaccagtggcagaatatttaaccagacctcatcttggaggacgaaatgagatggcagctaggaagaacatgctattggcggcccagcaactgtgtaaagaattcacagaacttctcagccaagaccggacaccccatgggaccagcaggctcgccccagtcttggagacgaacatacagaactgcttgtctcatttcagcctgattacccacgggtttggcagccaggccatctgtgccgcggtgtctgccctgcagaactacatcaaagaagccctgattgtcatagacaaatcctacatgaaccctggagaccagagtccagctgattctaacaaaaccctggagaaaatggagaaacacaggaaataaaattggaacgaagaaaggttaggagagtagggaaggaacaggactgcaaaaatccttctccaccgcacagactgggaacccctcctggcctgggggaagagtttgttacctaccttactatttaaagagccttcactggttctgcatcacccgcccctggacttcttagttgtttctctagcgctgagctatctcctaactttggacctattatcagaaggtgacaagtactggctctttattcattaagctttttttttttgaaccccattctttccttctctgaaagtggtgctataagttttagaatcttttaaatacattccctgggccaacagacccacacacttagccattgaaatgtcaaattgatgtgccctagatcaacagatcaacaataccttttttttcagtgttaaggtaatggttggtttttgtgtccgctaaatatttaccttgaaaaaaagaaaagtgtgtatctagcttcttcagagatcaagtcctctggtaggaggcaaaggttctatctgcttagcaactagttaataagtggtatctgacacactctaaaccccgtgttcaaacgggggccttctggttttaggaaacttgtagaaacgaagcctgctgattgatttttttctcctttttttttttttttttttttaactttgaaagttaactcttcaaatgggagactctttgaaatgacatgttcccttaaggtactgaagctttatttgcatatttatttcagatgtttcgagtaaacttgaaaagggtaggcacgaagcaatttgttgctgcttgtcacccccaagtccccgtggaggttctgtattttaagaaacagtgcgttgagtgtacagattttatttatgcgtaatttaatggggtctgtaaatactggtgcacttcttacgacttttttgagacatgggatccaattttaatattaacttttaatggtgatggggtaatctataacacatcataaggttttattcatatatatacagggtattaagaattaagaggatgctgggctctgttcttggcttggaagattctatttaattgaaactctctgttcagaaagcaataactttgtctcgttcctgttgggctgaaccctaaggtgagtgtgcagtacagtgtgtgtgggtgaaatggagatttggaattgaactctctgcctgtaaatgttccccaaataattgttgtgtgtatgatacgtgtataataaaagtattcttgttagaattgaaaaaaaaaaaaaaaaaaa

SEQ ID NO: 463 - DNA, 4452 bp, Homo Sapiens
cgccggtgaggtaggggcgggaggcggggggagacatggctcggcgcggctggcggcgggcacccctccgccgtggcgtcggcagcagtccccgagcccgcaggctcatgcggcccctttggttgctcctcgcagtgggcgtctttgactgggcaggggcttcggacggcggcggcggagaggctagagccatggacgaggagatcgtgtccgagaagcaagccgaggagagccaccggcaggacagcgccaacctgctcatcttcatcctgctgctcaccctcaccattctcacaatctggctcttcaagcaccgccgggcccgcttcctgcacgaaaccggcctggctatgatttatggtcttttggtgggccttgtgcttcggtatggcattcatgttccgagtgatgtaaataatgtgaccctgagctgtgaagtgcagtcaagtccaactaccttactggttacttttgatccagaagtatttttcaacatattacttcctcctatcatattttatgcaggttatagcctgaaaaggagacatttttttcgaaatcttgggtctatcctagcatacgcttttcttggaacagcaatttcttgtttcgttattgggtcaataatgtatggctgtgtaacgctgatgaaggtaacgggacaacttgcaggagatttttactttacagattgcctactgtttggtgccattgtatcagcaactgatccagtgactgttcttgctatattccacgagcttcaagttgatgttgaactctatgcacttctttttggtgaaagtgtcctcaatgatgctgttgccatagtgctgtcctcctcaatagtggcataccagccagctggagacaacagtcacacctttgatgtcacagcgatgttcaagtctattgggatcttccttggaatcttcagtggatcttttgcaatgggtgctgctactggagtggtgacagctttagtgacaaagttcaccaaattacgggagttccagttgttggagacaggcctgttcttcttgatgtcctggagtaccttcctcttggctgaagcatggggcttcacaggtgtagttgcagtattgttttgtggcatcacacaagcacattatacgtataataatttgtccacggagtctcagcatagaactaaacagttgtttgagcttctcaatttcttggcagagaatttcatcttctcctacatggggctgacactgttcaccttccagaaccatgtctttaacccaacatttgtagtaggagcatttgttgctattttcttgggaagagctgccaatatttaccccttgtccctcttacttaatttgggtagaagaagtaagattggatcaaattttcaacacatgatgatgtttgctggccttcgtggtgcaatggcatttgccttggccattcgagatactgccacttatgcacggcaaatgatgttcagcaccacgcttctgattgtgttttttaccgtgtgggtatttggtggtggcaccactgcaatgctgtcatgcttgcatatcagggttggtgttgattcagaccaagaacacttgggtgttcctgaaaatgaaaggagaactaccaaagcagagagtgcttggcttttccggatgtggtacaactttgatcataactatctgaagcctctgctgacccacagcgggcctccgctgacaacaacactccctgcctgctgtggacccatcgccaggtgcctcaccagcccccaggcttacgaaaaccaggaacagttgaaagatgatgattctgatcttattctcaatgatggtgacatcagtttgacatatggagattctactgtgaacactgaaccggccacatccagcgccccaaggagatttatgggaaacagttctgaagatgccttggatcgggagcttgcatttggggaccatgaactggtcattcgaggaacacgcctggttcttccaatggatgattctgaacccccgctaaatttgttagataatacgagacatggtccagcctaagcttactaatactcacttagtgatttgtaaaatttgcacatgtgattgtgaagaaatttgtactacctaaaagtcccagtgcatgtctctgaatgtgtaagctatataaatgctatttatatggcatagaaagaatataaatatcctgtacacggcagattgtgaacaaactatattcctttaagttttcctggttgcactctgtagactggatctgttttaggaagttactttcacagtgatgttgtgtgttctgttagttttatgtctcagttaaagtgtaaaaagtgacggattttctctttcttaaacttacctgacacttaaccagagtaccagttctcgtgatgtgaattaatttttttgtgtgctaggggagggagagtgaggagggagtgttatttccttgggaacctagggaggagaggttcctttgttgggaaacttttgttgatagctgctgcctttgtcctgatcgttttctttcccttttctctggtggcctgttgtggtgcaacgagctgatggcatttgatcttgccccattcaggttggggagtgaagtgtggggacccttttcccccgcttgctgtgaaagcacagattcattgactacagtacactgttgttcagaaaagaaggctgcaaatgacttctgagactttatgtcttttcttccagaccaagaccgtagaaggagtcacatctagccggcttagccaaagtacaggtgtatatagttcagggcacttgatttagatttggaggggctggggtgggcagagagcaagaggcgagtaaagagaatggtggtttcagagatctctcttcccaaatgtgtaaatattctataccagataagtttaaataagaaatttaattgctgcttaatttttgattatgtactttatctgtatagcaggctttgtcgtcagaagtttttatatcgatttaaattgctgctctttagcagccaaacaggagcaaaatgtaaaatttttgaacttactgtgtctaatcatcatttgttagtctgtagttaatgtcaacagttaatttatgaacccacgatcgttccacactgcaccaaagtcagtcataagagaaatcgaatattctggagcactgattgcagcagggtggctcctttgtgtgcagcaggtgtagtagtcttcattttcatggtacgttttaatattaattacctaagctgccatgcattttttttttacagttctcaaggaagagcacagaacaatttctcatttcatatttggagtatgaaagtagattctattttgtaatgctgataatacctaaagatgcattgaatgcttggaagaatgctttttgatgttgattttgacctgttcatgattcagaagaaaaacaaacttttttggattttttttccctcaggtctgagtagcattgccttaaatcttatccagttagaacattgatttatttacatgatgttcagattttccagtgaaaaatacccttctgaacaaaacatgtacttactctccgaaaggcatctatctgtgctattgcaaacactccttgagattttaggggaattctaatgttgtaccctttcgtggcagctttgactgttggcatagccatttgttatgtagtggtagcgactttcctgctatgcaggaatccctcccatgacgtgtatgttttacatgatgtgtgcctcttcacgcagtaaatagtttcttgttaatgtatgtttgaggagtttgaacgtcagtgtcacttacccacaaagttattcaagttgtaaaaggttataaataatttaacaactaccttttttattctgtcgggttactgacctcactttatgtaaatacttcgcatgacaaattcagtaactcgtctatttcagcatgcataagacttttcactagggaaactgataaagcttgagtcaactaaatctgccttcatactttatcaaggggaaccaagcctgctgtgcttacatcagcatctggaagactttcctctcctctaatctgtgtacacatctccaagcaaggaagaaaaaacaaactctgctcagacgcctatgaaacacctgaatgaactttgatgaagtacagtctgagttaccatcatgcacaagtagaactgctcttggacttgttttcctgttgtttgtggaacctacgcgtttgaatggcttgaacgttgcatcttttaaagttattttttaaggtttcttggcatttatcctagttgtccgtgtttggcaatgtgctgttaaagtaatagacttttaatctttatgtattttttgttttctctggagtacttggacagatgttatagtggtttcttttaggaaaatctgtcattaaaaaagttatagccttgcaaataaccactc

SEQ ID NO: 464 - DNA, 1890 bp, Homo Sapiens
atctgaagccagtaaacatggccgtcaccgacagcctcagccgggctgcgactgtcttggcaactgtgttgctcttgtccttcggcagcgtggccgctagtcatatcgaggatcaagcagaacaattctttagaagtggccatacaaacaactgggctgttctggtgtgtacatcccgattctggtttaattatcgacatgttgcaaataccctttctgtttatagaagtgtcaagaggctaggtattcctgacagtcacattgtcctaatgcttgcagatgatatggcctgtaatcctagaaatcccaaaccagctacagtgtttagtcacaagaatatggaactaaatgtgtatggagatgatgtggaagtggattatagaagttatgaggtaactgtggagaattttttacgggtattaactgggaggatcccacctagtactcctcggtcaaaacgtcttctttctgatgacagaagcaatattctaatttatatgacagggcatggtggaaatggtttcttaaaatttcaagattctgaagaaattaccaacatagaactcgcggatgcttttgaacaaatgtggcagaaaagacgctacaatgagctactgtttattattgatacttgccaaggagcatccatgtatgaacgattttattctcctaacataatggctctagctagtagtcaagtgggagaagattcactctcgcatcaacctgatcctgcaattggagtccatcttatggatagatacacattttatgtcttggaatttttggaagaaattaacccagctagccaaactaatatgaatgacctttttcaggtatgtcccaaaagtctgtgtgtgtctactcctggacatcgcactgatctttttcagagggatcctaaaaatgtactgataactgatttctttggaagtgtacggaaagtggaaattacaacagagactattaaattgcaacaggattcagaaatcatggaaagcagctataaggaagaccagatggatgagaaactaatggaacctctgaaatatgctgaacaacttcctgtagctcagataatacaccagaaaccgaagctgaaagactggcatcctcctgggggctttattctgggattatgggcacttattatcatggttttcttcaaaacttatggaattaagcatatgaagttcattttttagacttgatgatgaatgaagaatgcatggaggactgcaaacttggataataatttatgtcattatatatttttaaaaatgtgtttctcttgtatgaattggaaataagtataaggaaactaaatttgaatcaactattaattttataacttaaagaaaaataattgttaatgcaactgcttaatggcactaaatatattccagttttgtattttgtgtattataaaagcgaatgagacagagatcagaatacattgactgtttttgaaaatagtaatttccccttatccccttttcatttggaaaagaaacaattgtgaagacattaaattctcactaacagaagtaactttggttaattattttttgtatatcctcccaatcttttgacttatgcacatattttttcccaatatggagatcatatggaatgtactattttgtaatgtcttttttcattttacaatgtattatcaaccttttccctctcaaaaatacattgtgaatgactgcatagtattcactttatgaatatttaattcatttcacagtcttctattgttggaccacttacattgtaccaaatgttttcctttggtttattctttaatgtattaatattttactgctggtcactcatggaatcctgcagctttaattaaaagcaaagatgaaaaaaaaaaaaaaa

SEQ ID NO: 465 - DNA, 7332 bp, Homo Sapiens
ttcagacaaatttaatcacaatgaccacatataatgtgctgtttgagattcttatagaacagattggtactcaggtgatacataaacagcatccagatcctgattcttcagtgaagatacaaaaccctcagatactaaaagtaattgcgaccctacttcgaaattctccccagtgcccagagagcatggaggttcgcagagcctttctttctgacatgattaaactttttaataacagtagagaaaacaggaggagcttgctacaatgctctgtgtggcaagaatggatgctttctctctgctattttaatcctaagaattcagatgagcaaaagataacagaaatggtatacgccatattcagaatcctgctttaccatgcagtcaaatatgagtggggtggctggcgtgtatgggtagacactttatcaatcactcattcaaaggtcacttttgaaatacacaaagaaaaccttgccaatatatttagggaacagcaaggaaaagttgatgaagaaatagggctgtgttcttcaacttcagttcaagcagcctctggcattagaagggatattaatgtttcagtaggatcccagcaaccagatacgaaggattctcctgtctgtcctcatttcaccacaaatggtaatgaaaattcaagtatagagaagacaagttcactagaatctgcatctaatattgaactgcaaactactaatacatcttatgaagaaatgaaagctgagcaagaaaatcaggagttaccagatgaaggcactttggaagaaacactgacaaatgagacaaggaatgcagatgatttagaagtatcttctgacataatagaagctgtggctatttcctctaattcttttataacaactggcaaagattcaatgactgtcagtgaagtaactgcttctataagttctccttcagaagaggatgcctcagagatgccagaattcttggataaatctatagtagaggaagaggaagatgatgattatgtggaactgaaagtagaaggcagtcctactgaggaagctaatctacccacagagctccaagataacagtttgtctccagctgcatctgaagccggtgaaaaactggacatgtttggtaatgatgacaaattaatatttcaagaaggaaaacctgttactgaaaagcaaactgatactgaaactcaagattctaaagattctggaattcagactatgacagcatcagggtcttcagctatgtcaccagaaactactgtttcccaaatagctgtagaatcagaccttggtcagatgctggaggaagggaagaaagcaactaacctcactagagaaaccaaattaattaatgattgtcatggtagtgtctctgaggcttcttctgagcaaaagattgcgaagttggatgtttccaatgttgctacagatactgagaggctggagttgaaggccagtcccaacgtggaagcacctcaacctcatcgacatgtgcttgagatatcaaggcaacatgagcagccagggcaaggaatagcaccagatgcagttaatggacaaaggagggattccagatctactgtgtttcgtattcctgagttcaactggtctcagatgcatcaacgtttgctcactgatctattattttcaatagaaacagatatacagatgtggagaagccattcaacaaagacagttatggacttcgtgaatagcagtgataatgtcatctttgtacacaacacaattcatctcatctctcaagtgatggacaatatggtcatggcttgtgggggtatactgccattgctttcagctgctacatcggctacacatgaactggaaaatattgaacctactcaaggcctttcaatagaagcctctgtgacatttttgcagaggctaattagccttgtggatgtgcttatatttgcaagttctcttggctttactgaaattgaagctgaaaaaagtatgtcatctggaggaattttgcggcagtgtctccgactagtttgtgcagtcgcagtaaggaattgcttggagtgtcaacagcattcacaactgaaaactaggggagataaagccttgaaaccaatgcatagccttattcctttagggaaatctgcagcgaagagcccagtggacattgtgactggcggtatatctccagtaagagatcttgacaggcttctacaggacatggatattaatcggcttagggcagttgttttcagagacatagaggatagcaaacaagctcaatttttagccttggcagtagtatactttatctctgttcttatggtctccaagtacagagacattttggaaccccaaaatgaaaggcatagccagtcatgtacagaaactggcagtgaaaatgagaatgtatcactctctgaaatcacaccagcagcattcagcactttaactacggcatcagtggaagaatctgaaagcacatcatctgctcgaaggagggactcaggcattggggaagaaacagccactggtttaggaagccatgtggaagtaactcctcacacagcacctcctggtgtcagtgcaggcccagatgcaatcagcgaggtgctatctactctttctttagaagtcaataagtctccggaaaccaaaaatgatagaggaaatgacttggacactaaggctacaccgtcagtttcagtttcaaaaaacgtcaatgtgaaagacattctccgaagcttggttaacataccagcagatggagtcacagtggatcctgcccttctgccaccagcctgccttggagcccttggtgatctatctgtggaacaacccgtgcagttcagatcttttgacagaagtgtcattgttgcagcaaaaaagtcagcagtctcaccttccacctttaatacaagcatacctaccaatgctgtcagtgtggtttcctcagtagattcagcccaagcctcagatatgggaggagaatcaccaggcagtagatcatctaatgcaaaattgccctcagttccaacagttgattcagtttcacaagatccggtttcaaatatgagtattacagagaggcttgaacacgctttggaaaaggcagctcctctccttcgtgagatttttgtggattttgcaccttttctttctcggacacttttgggtagccatggacaagaactgcttatagaaggaacaagtctggtttgcatgaagtcgagtagttcagttgtggaattggttatgctactgtgttctcaggagtggcaaaattctattcagaagaatgcaggccttgcttttatcgaacttgtcaatgaaggaaggttgcttagccagacaatgaaggatcatctagtaagagtagcaaatgaagctgaatttatcctgagcaggcagagagcagaagatattcacagacatgcggaatttgagtcactgtgtgcccagtattctgcagacaaacgagaagatgagaagatgtgtgatcatttgataagagcagcaaaatatcgtgaccacgtgacagcaactcaactaatccagaaaattatcaacattctcacagacaagcatggagcctggggaaattctgcagtgagtcgtcctcttgagttctggcgccttgactactgggaagatgacttgcggcgccggcgacgatttgtgcgtaaccctctaggatcgacacatcctgaagcgacactaaaaacagccgtggaacatgtgtgcatttttaaattgagagagaacagcaaagccacagatgaagatatccttgctaaaggaaaacagtccatcaggagtcaggctttaggaaatcagaactcagaaaacgagatcctcctggaaggcgatgatgatactctgtcatccgtggatgagaaagatttagagaatcttgccggtcctgttagcctgagcacaccagctcagcttgtggccccctctgttgtagtaaagggcactctttctgtcacctcctccgaactctattttgaggtggatgaagaggatcctaacttcaaaaaaatcgaccccaagatcttggcatatacagaagggctgcatggaaaatggctgttcacagagatacgatcaatcttttctcgtcgttatcttttgcaaaatacagccctggagatctttatggcaaacagagttgctgtgatgttcaacttcccagaccctgcaacagtaaagaaagtggttaactttctacctcgtgttggcgttggaacaagttttggattgcctcaaaccagacgtatttcattagctagtccacgtcagctttttaaggcttctaatatgacccagcgatggcaacacagagagatatctaattttgagtacttgatgtttctcaacacgatagcaggacggagttataatgacttaaatcagtatccagtgtttccttgggtcatcactaattatgaatcagaagaactggatcttaccttgcccaccaacttcagagatttgtccaagccaataggagctctgaacccaaaaagagcagcattcttcgctgagcgttatgaatcatgggaagatgatcaagttccaaagtttcactatggtactcattactcaactgcaagttttgttcttgcatggctgctaagaatagaaccctttacaacttatttcctaaatttgcaaggaggcaaatttgatcatgcagatcgaactttttcatcaatttccagagcttggcgaaacagtcagcgtgatacctctgatattaaggagttgatccctgaattttattatctccctgagatgtttgtcaacttcaataattataatcttggagtgatggatgatgggacagtagtgtctgatgtcgaacttcctccttgggccaaaacctcagaagaatttgttcacataaacagattggccctggagagtgaatttgtttcctgccagcttcaccaatggattgatctcatttttggctataaacagcaaggaccagaagctgtccgagccctcaatgtgttctattacttgacctatgaaggagctgtcaatctgaattcaataactgatcctgtgttgagagaggctgttgaagctcaaatccgaagttttggacagactccttctcaactactcatagagccccatcctcccagaggttctgccatgcaagtgagtccattgatgttcacagacaaagcccagcaggatgttatcatggtcctcaagtttccctccaactcccctgttactcacgtggcagccaacacccagcctggtttggcaactcccgctgtgatcacagtcactgctaacaggttatttgcggtgaacaaatggcacaaccttcctgctcatcaaggtgctgtacaagaccagccataccagctgccagtggaaatcgatcctctcatagccagcaatacaggaatgcacaggaggcaaatcactgaccttttagaccaaagtattcaagtgcattcccagtgctttgtcatcacttcagacaaccgctatattctcgtctgtggcttctgggataaaagtttcagagtctattctacagacacaggaagattgatccaagtggtgtttggccattgggatgtcgtcacttgccttgctcgttctgagtcatatattgggggaaattgctacattctctcagggtcacgtgatgcaactcttttgctgtggtattggaatggaaatgcagtgggattggagataacccaggcagtgagactgctgctcctcgggccattttgaccggccatgactatgaggtcacatgtgctgcggtgtgtgcggagctaggcctggtgttgagtggttcacaagaaggaccatgtctcatacattccatgaatggagacttgttgaggaccttggagggtcctgaaaactgcctgaaaccaaaactcattcaggcttcaagagagggtcattgtgtcatattctatgaaaacggcctcttctgtacattcagtgtgaatggaaaactccaggccacgatggaaacagatgataacataagagccatccagctgagccgagatgggcagtacctgctcacaggaggagacagaggagtggtcgtggtccggcaggtgtcggacctcaagcagctctttgcctatccaggatgtgacgctggaatccgggccatggcgctgtcttacgaccagaggtgcatcatttctggcatggcttcaggaagcattgtgctattttacaacactttaaccggtggcatcatgataccaaacccgctactgatggtgacagctgtacatcaactctgcccctaggatgagcagaagtacctggagcataattctcttctaccacatctgaatgtaacttaaatttgctcaaagaagcaaaatattttttaaagttattaataattgctatttttgtagtctttgcttgacttttttgggggggattagcaaagcagaaaactggctgctgggttctgtagttttaaaaaatctatatttttagtcataatgagaagtctattttcaccaattatggaaacatacagtggagcaagtaaaccacttattccagctataatattatgaagaacatttcccatgcatctacaagcttgagaaataggattttcacagtggggaagtgggttacaatattggaataggaaaatttgatgctgtaatttgggtcctgtatttttccaaacaactgtgcttcttcagcactaatatttctgggatttaaatagtaatgtttaaattatggtaaatgtaatttaaaacatctcaattaagtctgtctatcaatattgttcttcaagcatgttttagacctagaaaagtatggtttgggggaggctattttattgtgtggttagcacaaggaatctaatttatagcaagtgtgaaatagttaccattttttcctgatctgtcatcttcatagcacaacaaaacgaaatgatggaaatgctcttgagctcacaacatttgtttttcttttaaagtaaatgcaagtaccaaagctcactactgcggtttgcctgtgcctggacaatgaggcggagccactgttgttggggcacccccttccctccccgggtttgcaaatagaggctaccgggtgctgtattcagcaacacctgttttactatttgttattaaactatcatctccaccttccttttgattagcaatttgtactaagaaacgaaacaatgttatttggtggtgtataattctacttttctagtagattactgtgtggaattctgtgaaaaatatttgagaaaaggcctgtattgcataaataaattctttgtatgttgtgaaaaaaa

SEQ ID NO: 466 - DNA, 363 bp, Homo Sapiens
tttttttttttttttttttacttgaccgtaggacatattaagatgtttattatttactaagagtaacatgtatacatttgcagtaatttgtacaatccaactacattacaattcacagtaacatacactagctctaacctgccttggatacaattaagtctcctcaacacactattttatcgccaaacttacattctggcttttataatcattttgcaacacctggtacagtatacacctatagctttgccatagaaatgcccctaaatgcccttcagagagcagaggtgaatactttctcatgaagaaacgccaacttttctaagcgagttcgtttcagtagtgggagccattcccagtagg

SEQ ID NO: 467 - DNA, 484 bp, Homo Sapiens
ttttttttttttttttttcattgtttacaaaaatttattcatacaaattttacacactttatataacagttatcaaagtcctagttatagatatcatgtgggtaataatacttggttaaggggtttttataatcagttgcccacaaaataagagcttcaaaactaacatctacctaaattatcactatatcataaatctgcttcagtttagtaagggtcttggcatttctaaaaagtatacaaaaaattaaactgggtgatcactgtaaaatgcttgcaactagccacgggaacactaaattagacttcataaataaaaggttaactagagccctatttcaccactaacagctgatacaaatacagaaaactctgcccattatccaagaaacaaataattaaaactaaaatgcaagctgatgtgttgcagcattgtagggccactaaatagccatctgtgattcggggcaatttaaaaggcgaa

SEQ ID NO: 468 - DNA, 287 bp, Homo Sapiens
  misc_feature (39)..(39): n is a, c, g, or t
  misc_feature (75)..(75): n is a, c, g, or t
  misc_feature (186)..(186): n is a, c, g, or t
  misc_feature (206)..(206): n is a, c, g, or t
  misc_feature (214)..(214): n is a, c, g, or t
  misc_feature (245)..(245): n is a, c, g, or t
  misc_feature (265)..(265): n is a, c, g, or t
  misc_feature (278)..(278): n is a, c, g, or t
tttttttttttttttttttttttttccacttgttcacanattttatttatccacgtgaaggaagaaaaaaaaaangggggggggctttaaggtggcacaattttaagaaaataccatccatttttctcagtctaatctgaatccatacattaaaacaaaagtgcaagtgatgagacgaacatcttnttggagaacaaagcatcttntttgagantgaaaaccctttttaaggttaatatctaccnaggggttccttatttgaggntggcttacttttntttttttaa

SEQ ID NO: 469 - DNA, 399 bp, Homo Sapiens
tagcgtggtcgcggccgaggtacgcgggtataccagtggactattgacctccaattttttaaaaagttgaaattttaacaattaccaatacttttttttcttccttcaattggaaattctgagggatacagttatgtcatgattacttgtgaaatctctccccacaaaaattttactgataataaacatgagtaaatgagaaagtctataaataacaatagactttgcctcataacacgtgttgtgttaggttttgggatggctttctagggagcaattctgaaattacttgacagatacactctttatggtaaacaggtcatttcagagtctagagtgctaaccattacactatggaaccatgataaataggtcatttcaaactgatatgtcacaatg

SEQ ID NO: 470 - DNA, 455 bp, Homo Sapiens
tttcataggttacacagttttaaaaatgtgactgacatagaaaggtagatagtaagatttgcattatggcagtgcattggccagggtgataaagattcaaaattaattttgcaaaatttgaggacctactctgtgccaggattcatcttggattcatgggaatggcagacttatacttgcgttttttccaagtgtaggtaccccactctgagcatctttcttttttcttttttttttttctgtgaagctgggagacacagaggcatagtctccttcttaaaatttgcatcagagttgaccagcatccatttcattttgttgtcttatttattcagaaattatggttatctgctttcctgcatggaacgtaaatccttaaaagtagggcagaagtggattcatgcttggattctcagggcctggtttactcagtggtcccaaaagcaaacatctat

SEQ ID NO: 471 - DNA, 280 bp, Homo Sapiens
  misc_feature (41)..(42): n is a, c, g, or t
  misc_feature (45)..(45): n is a, c, g, or t
  misc_feature (83)..(83): n is a, c, g, or t
  misc_feature (99)..(99): n is a, c, g, or t
  misc_feature (101)..(101): n is a, c, g, or t
  misc_feature (103)..(103): n is a, c, g, or t
  misc_feature (110)..(110): n is a, c, g, or t
  misc_feature (116)..(116): n is a, c, g, or t
  misc_feature (129)..(130): n is a, c, g, or t
  misc_feature (188)..(188): n is a, c, g, or t
  misc_feature (199)..(199): n is a, c, g, or t
  misc_feature (206)..(206): n is a, c, g, or t
  misc_feature (209)..(209): n is a, c, g, or t
  misc_feature (212)..(212): n is a, c, g, or t
  misc_feature (218)..(218): n is a, c, g, or t
  misc_feature (226)..(226): n is a, c, g, or t
  misc_feature (229)..(229): n is a, c, g, or t
  misc_feature (233)..(234): n is a, c, g, or t
  misc_feature (260)..(260): n is a, c, g, or t
  misc_feature (272)..(272): n is a, c, g, or t
aatgacaaaagcccaattctatggtttccattacacaggannccncaaggtttgtttttcctcaagggattcctatggggttnctctcctccccctgtnananaagatanctgatnggggttccaccanntggtcctgtgccggaagggaaccagaatcctggtggtcccggggaaagggaaaggggntcaggatgggngggggtntgntanggaatntaattggntcnacanngggggaaggaaaggcaggaaatttcnaaggattccaanccttccca

SEQ ID NO: 472 - DNA, 463 bp, Homo Sapiens
ttttttttcaaatgcattctttttatttgagaaggatgatctcaaggcagtgccctttgggaaagatgtctttcatcatcatgtacatcaggatcaaccattactttcagcaaagtacaaaaatacacacgtcagtgacttccgtacaataaatacataatcatgcatcccacaataaaaggcaccgaaaactggtcacttagtagtcataaaaattactagctacattaacaaagccaccaaaattatctgtacaaggaaatgtaacaatatattccaaaggtgaaaacacataaaacatctttaaaatagtaggcaataaatatctcaattgtatatatttttaaaattatgccattgtaaacagcatgtaaacaaacaaaactcacgttgtcttaccattactaaaagtaattagagccaaagttataacctctgctctgtcaggtatatttcactggca

SEQ ID NO: 473 - DNA, 485 bp, Homo Sapiens
tgttatatattagcttttattcaatgagtttaaagttatcacctggtgactcaaaacttaacgtatgcatatctactttccacaacatattgagtaatattctaatagctgacccagggatagtctttatgaatgttataggtattataaatatcttactaaagttatgcataacagcataatcagttataggtatactatcaatagaatgcagaaatatgattcaacataacaatcacagttaattctgaaaggagatcacataagaaatatcagcatatttttcagaaggaacagttatgacaaaagaccaaggcacaaatatggtgaggacgacttaagggagggggtgaaagtggatgcaaattaaatcttggacctcctataacgttctgagacatggagttcttctttaaacctctggatgtgaagggagaacaatagatatcctttaagatataagcctagctcattagtatccttta

SEQ ID NO: 474 - DNA, 1552 bp, Homo Sapiens
gcccgtacacaccgtgtgctgggacaccccacagtcagccgcatggctcccctgtgccccagcccctggctccctctgttgatcccggcccctgctccaggcctcactgtgcaactgctgctgtcactgctgcttctgatgcctgtccatccccagaggttgccccggatgcaggaggattcccccttgggaggaggctcttctggggaagatgacccactgggcgaggaggatctgcccagtgaagaggattcacccagagaggaggatccacccggagaggaggatctacctggagaggaggatctacctggagaggaggatctacctgaagttaagcctaaatcagaagaagagggctccctgaagttagaggatctacctactgttgaggctcctggagatcctcaagaaccccagaataatgcccacagggacaaagaaggggatgaccagagtcattggcgctatggaggcgacccgccctggccccgggtgtccccagcctgcgcgggccgcttccagtccccggtggatatccgcccccagctcgccgccttctgcccggccctgcgccccctggaactcctgggcttccagctcccgccgctcccagaactgcgcctgcgcaacaatggccacagtgtgcaactgaccctgcctcctgggctagagatggctctgggtcccgggcgggagtaccgggctctgcagctgcatctgcactggggggctgcaggtcgtccgggctcggagcacactgtggaaggccaccgtttccctgccgagatccacgtggttcacctcagcaccgcctttgccagagttgacgaggccttggggcgcccgggaggcctggccgtgttggccgcctttctggaggagggcccggaagaaaacagtgcctatgagcagttgctgtctcgcttggaagaaatcgctgaggaaggctcagagactcaggtcccaggactggacatatctgcactcctgccctctgacttcagccgctacttccaatatgaggggtctctgactacaccgccctgtgcccagggtgtcatctggactgtgtttaaccagacagtgatgctgagtgctaagcagctccacaccctctctgacaccctgtggggacctggtgactctcggctacagctgaacttccgagcgacgcagcctttgaatgggcgagtgattgaggcctccttccctgctggagtggacagcagtcctcgggctgctgagccagtccagctgaattcctgcctggctgctggtgacatcctagccctggtttttggcctcctttttgctgtcaccagcgtcgcgttccttgtgcagatgagaaggcagcacagaaggggaaccaaagggggtgtgagctaccgcccagcagaggtagccgagactggagcctagaggctggatcttggagaatgtgagaagccagccagaggcatctgagggggagccggtaactgtcctgtcctgctcattatgccacttccttttaactgccaagaaattttttaaaataaatatttataat

SEQ ID NO: 475 - DNA, 274 bp, Homo Sapiens
gctcggcgcttcgctcctcacggacctcaggacggctctaactcggaaacagtccccaaacgggcccagatcctctggcgtatcataagagggccttgatgtacacacgtcggtactcaagcataagcagtactataatggatgtagacagcacaatttccagtgggcgttcaactccagcaatgatgaatggacaaggaagcactacttcttcaagcaaaaatattgcctataattgttgttgggaccagtgccaggcttgcttcaactctag

SEQ ID NO: 476 - DNA, 241 bp, Homo Sapiens
  misc_feature (134)..(134): n is a, c, g, or t
  misc_feature (229)..(229): n is a, c, g, or t
cacagagagaggcagcagcttgctcagcggacaaggatgctgggcgtgagggaccaaggcctgccctgcactcgggcctcctccagccagtgctgaccagggacttctgacctgctggccagccaggacctgtntggggaggccctcctgctgccttggggtgacaatctcagctccaggctacagggagaccgggaggatcacagagccagcatggatcctgacagtnatcaacctctga

SEQ ID NO: 477 - DNA, 185 bp, Homo Sapiens
acctgaggatgcagaagtgcattgtgattcagctgcagtttcacatgagccaacaccagctgaccccagaggggaggggcatgaaaatgcagctgtgcagggtgcaggggctgccgccattgggccccctgtgcagcctcaggatgccaacgccctggagccccctctcaatggagacgtgactg

SEQ ID NO: 478 - DNA, 2635 bp, Homo Sapiens
ttctcttttaacagtgtttggtgtgtgcaagcaggatccaaaggagacctatagtgactcccaggagctcttagtgaccaagtgaaggtacctgtggggctcattgtgcccattgctctttcactgctttcaactggtagttgtgggttgaagcactggacaatgccacatactttgtggatggtgtgggtcctgggggtcatcatcagcctctccaaggaagaatcctccaatcaggcttctctgtcttgtgaccgcaatggtatctgcaagggcagctcaggatctttaaactccattccctcagggctcacagaagctgtaaaaagccttgacctgtccaacaacaggatcacctacattagcaacagtgacctacagaggtgtgtgaacctccaggctctggtgctgacatccaatggaattaacacaatagaggaagattctttttcttccctgggcagtcttgaacatttagacttatcctataattacttatctaatttatcgtcttcctggttcaagcccctttcttctttaacattcttaaacttactgggaaatccttacaaaaccctaggggaaacatctcttttttctcatctcacaaaattgcaaatcctgagagtgggaaatatggacaccttcactaagattcaaagaaaagattttgctggacttaccttccttgaggaacttgagattgatgcttcagatctacagagctatgagccaaaaagtttgaagtcaattcagaatgtaagtcatctgatccttcatatgaagcagcatattttactgctggagatttttgtagatgttacaagttccgtggaatgtttggaactgcgagatactgatttggacactttccatttttcagaactatccactggtgaaacaaattcattgattaaaaagtttacatttagaaatgtgaaaatcaccgatgaaagtttgtttcaggttatgaaacttttgaatcagatttctggattgttagaattagagtttgatgactgtacccttaatggagttggtaattttagagcatctgataatgacagagttatagatccaggtaaagtggaaacgttaacaatccggaggctgcatattccaaggttttacttattttatgatctgagcactttatattcacttacagaaagagttaaaagaatcacagtagaaaacagtaaagtttttctggttccttgtttactttcacaacatttaaaatcattagaatacttggatctcagtgaaaatttgatggttgaagaatacttgaaaaattcagcctgtgaggatgcctggccctctctacaaactttaattttaaggcaaaatcatttggcatcattggaaaaaaccggagagactttgctcactctgaaaaacttgactaacattgatatcagtaagaatagttttcattctatgcctgaaacttgtcagtggccagaaaagatgaaatatttgaacttatccagcacacgaatacacagtgtaacaggctgcattcccaagacactggaaattttagatgttagcaacaacaatctcaatttattttctttgaatttgccgcaactcaaagaactttatatttccagaaataagttgatgactctaccagatgcctccctcttacccatgttactagtattgaaaatcagtaggaatgcaataactacgttttctaaggagcaacttgactcatttcacacactgaagactttggaagctggtggcaataacttcatttgctcctgtgaattcctctccttcactcaggagcagcaagcactggccaaagtcttgattgattggccagcaaattacctgtgtgactctccatcccatgtgcgtggccagcaggttcaggatgtccgcctctcggtgtcggaatgtcacaggacagcactggtgtctggcatgtgctgtgctctgttcctgctgatcctgctcacgggggtcctgtgccaccgtttccatggcctgtggtatatgaaaatgatgtgggcctggctccaggccaaaaggaagcccaggaaagctcccagcaggaacatctgctatgatgcatttgtttcttacagtgagcgggatgcctactgggtggagaaccttatggtccaggagctggagaacttcaatccccccttcaagttgtgtcttcataagcgggacttcattcctggcaagtggatcattgacaatatcattgactccattgaaaagagccacaaaactgtctttgtgctttctgaaaactttgtgaagagtgagtggtgcaagtatgaactggacttctcccatttccgtctttttgatgagaacaatgatgctgccattctcattcttctggagcccattgagaaaaaagccattccccagcgcttctgcaagctgcggaagataatgaacaccaagacctacctggagtggcccatggacgaggctcagcgggaaggattttgggtaaatctgagagctgcgataaagtcctaggttcccatatttaagaccagtctttgtctaagttggggatctttatgtcactagttatagttaagttcattcagacataattatataaaaactacgtggatgtaccgtcatttgagga

SEQ ID NO: 479 - DNA, 1829 bp, Homo Sapiens
agcgccgtacccacgctttagcacatgcgtactcaggtgcgccggtaggggacgcgccggcacagcaaaaatggcggcggcattacgggtggcggcggtcggggcaaggctcagcgttctggcgagcggtctccgcgccgcggtccgcagcctttgcagccaggccacctctgttaacgaacgcatcgaaaacaagcgccggaccgcgctgctgggagggggccaacgccgtattgacgcgcagcacaagcgaggaaagctaacagccagggagaggatcagtctcttgctggaccctggcagctttgttgagagcgacatgtttgtggaacacagatgtgcagattttggaatggctgctgacaagaataagtttcctggagacagcgtggtcactggacgaggccgaatcaatggaagattggtttatgtcttcagtcaggattttacagtttttggaggcagtctgtcaggagcacatgcccaaaagatctgcaaaatcatggaccaggccataacggtgggggctccagtgattgggctgaatgactctgggggagcacggatccaagaaggagtggagtctttggctggctatgcagacatctttctgaggaatgttacggcatccggagtcatccctcagatttctctgatcatgggcccatgtgctggtggggccgtctactccccagccctaacagacttcacgttcatggtaaaggacacctcctacctgttcatcactggccctgatgttgtgaagtctgtcaccaatgaggatgttacccaggaggagctcggtggtgccaagacccacaccaccatgtcaggtgtggcccacagagcttttgaaaatgatgttgatgccttgtgtaatctccgggatttcttcaactacctgcccctgagcagtcaggacccggcttccgtccgtgagtgccacgatcccagtgaccgtctggttcctgagcttgacacaattgtccctttggaatcaaccaaagcctacaacatggtggacatcatacactctgttgttgatgagcgtgaattttttgagatcatgcccaattatgccaagaacatcattgttggttttgcaagaatgaatgggaggactgttggaattgttggcaaccaacctaaggtggcctcaggatgcttggatattaattcatctgtgaaaggggctcgttttgtcagattctgtgatgcattcaatattccactcatcacttttgttgatgtccctggctttctacctggcacagcacaggaatacgggggcatcatccggcatggtgccaagcttctctacgcatttgctgaggcaactgtacccaaagtcacagtcatcaccaggaaggcctatggaggtgcctatgatgtcatgagctctaagcacctttgtggtgataccaactatgcctggcccaccgcagagattgcagtcatgggagcaaagggcgctgtggagatcatcttcaaagggcatgagaatgtggaagctgctcaggcagagtacatcgagaagtttgccaaccctttccctgcagcagtgcgagggtttgtggatgacatcatccaaccttcttccacacgtgcccgaatctgctgtgacctggatgtcttggccagcaagaaggtacaacgtccttggagaaaacatgcaaatattccattgtaaacaaatcaaaggaaaagaaaccaagaactgaattactgtctgcccattcacatcccattcctgccttttgcaatcatgatacctggcaatccaaataggttggataagcttataataactgagtttattaaattctaga

SEQ ID NO: 480 - DNA, 398 bp, Homo Sapiens
  misc_feature (132)..(132): n is a, c, g, or t
  misc_feature (397)..(397): n is a, c, g, or t
tctgggactttataacataacgcaccatatgtacatgcactctgagctcttaaaacctcagagagtttacctgcaaaaggtggtcccagcaatgcagagatgccattagcacagatgatgatgccgtacttngcgccaggtgttcaatgccaaccaagtcttcagtcactacgggcattagggagaaataaccactggaaaaccctatcagcgcacagatgaccgccagccagcgtacgtgtgcatcaacggcagaataaaaatactgaggacaagggtgaagttggccaacaggaagacattccaaacactaatgcaaggcaagtcggctatgacgcccaggatcacttttccaaagatgtgaactattgctataattgacgtcagagggaaaacnt

SEQ ID NO: 481 - DNA, 606 bp, Homo Sapiens
tctttctggcttgttagatcttctcatttggcgtcctttctccgaagagttaaccaagacgtttggcgtggttttcttgctttcctcctatcttttgctgctagagctgctttcaaaaagaagtcttttcttgcagtgataccttttctttgggttacagtgttgttcatcctttctttgccgaaagaatgaatcccagtgcttcacgaagttaaaggaaagatctgctggtagtgtttagtctttgttctgagctgatatgtgttagtagctttttgtttttaaattttattagtaaaatttcaccagtgaaccagaagctctttttttctgttgtgaaatgctagctttaagatttctgagaactttgtgtcaaagaaatctttgaaaagttactgaagtatacagagagggtcacaattttaaatgtgcaggtggtccgggcgcggtagatcacacctgtaatccaacactttgggacgcccgggtgggcgggatcacttgacccaagattttccaaccaaccttggcaacgtgccaaaaccctatttttcctaaattaccaaaagttccctgggtgtggggggtgtgccctgagccccaact

SEQ ID NO: 482 - DNA, 3277 bp, Homo Sapiens
atctttgatcaatgtacttgccagggagagcccaagtccttcaaacctcctccttttcaccttcatccttaactttgtgctagagcgagacccacacaacaacagccgaccctccccgccccacccccacccccaaaccagccctcgatcccagcccccggagaggactcgcatttcgacttgcgggacacttttgtgcgttcctctccagagcgcctctcgtgctcgcccctcttgcgctcgctctttattaccttcacctccttttctcccccttctctccctttctccttctcgttctctcccggagttgttgttgcccccctcgctccttctccccccttttctccccttcccctcccgggggtgtgtggcaacttttcctctcgcttctcctccgtctgtttccccttatatgtgaccatggcagtgccggcggctttgatccctccgacccagctggtcccccctcaacccccaatctccacgtctgcttcctcctctggcaccaccacctccacctcttcggcgacttcgtctccggctccttccatcggacccccggcgtcctctgggccaactctgttccgcccggagcccatcgcttcggcggcggcggcggcggccacagtcacctctaccggcggcggcggcggcggcggcggcagcggaggcggcggcggcagcagcggcaacggaggcggcggtggcggcggcggcggtggcagcaactgcaaccccaacctggcggccgcgagcaacggcagcggcggcggcggcggcggcatcagcgctggcggcggcgtcgcttccagcacccccatcaacgccagcaccggcagcagcagcagcagcagtagcagcagcagcagcagcagcagtagtagcagcagcagcagtagcagcagcagctgcggccccctccccgggaaacccgtgtactcaaccccgtccccagtggaaaacacccctcagaataatgagtgcaaaatggtggatctgaggggggccaaagtggcttccttcacggtggagggctgcgagctgatctgcctgccccaggctttcgacctgttcctgaagcacttggtggggggcttgcatacggtctacaccaagctgaagcggctggagatcacgccggtggtgtgcaatgtggaacaagttcgcatcctgaggggactgggcgccatccagccaggagtgaaccgctgcaaactcatctccaggaaggacttcgagaccctctacaatgactgcaccaacgcaagttctagacctggaaggcctcctaagaggactcaaagtgtcacctccccagagaactctcacatcatgccgcattctgtccctggtctcatgtctcctgggataattccaccaacaggtctgacagcagccgctgcagcagctgctgctgctaccaatgcagctattgctgaagcaatgaaggtgaaaaaaatcaaattagaagccatgagcaactatcatgccagtaataaccaacatggagcagactctgaaaacggggacatgaattcaagtgtcggactggaacttccttttatgatgatgccccaccctctaattcctgtcagcctacctccagcatctgtcaccatggcaatgagccagatgaaccacctcagcaccattgcaaatatggcagcagcagcacaagttcagagtcccccatccagagttgagacatcagttattaaggagcgtgttcctgatagcccctcacctgccccctctctggaggaggggagaaggcctggcagtcacccatcatcacatcgcagcagcagcgtgtccagctcccctgctcggactgagagctcttctgacagaatcccggtccatcagaatgggttgtccatgaaccagatgctgatgggcttatcaccaaatgtacttcctgggcccaaagagggagatttggccggtcatgacatgggacatgagtcaaaaaggatgcatattgaaaaagatgagaccccgctttctacaccaaccgcaagagacagccttgacaaactctctctaactgggcatggacaaccactgcctccaggttttccatctccttttctgtttcctgatggactgtcttccatcgagactcttctgactaacatacaggggctgttgaaagttgccatagataatgccagagctcaagagaaacaggtccaactggaaaaaactgagctgaagatggattttttaagggaaagagaactaagggaaacacttgagaagcagttggctatggaacaaaagaatagagccatagttcaaaagaggctaaagaaggagaagaaggcaaagagaaaattgcaggaagcacttgagtttgagacgaaacggcgtgaacaagcagaacagacgctaaaacaggcagcttcaacagatagtctcagggtcttaaatgactctctgaccccagagatagaggctgaccgcagtggcggcagaacagatgctgaaaggacaatacaagatggaagactgtatttgaaaactactgtcatgtactgaatctttcctgttgaagaaatccatgttatagaaaagaactttgcagtcagacattcgtcatgggaaagttcagaaaaaaataaagtccttttaagggaacttcctgaattttgtgtattaatgttctttaaaagtttaagtattctacaaaaaaaaaaaaaaagttttctccattgattttcacctgtggttcataccagagacctgagaatgtttgtaaatgtacaagtatcaaagttcttacagttaattactgcaacttgctgctggacaattgtatacagagttaaaggcaggtctgaataagacctagctttgtttttttctaatggaatgaaccattttcctcttctgaaaattctgtatctgagcacatcaagagactcttgtagcagtggttacccagacttacagaattatgtcctccagaaaccagcaagaacacttggaatgaacgaatgaacttgtagggggcatagaggattcttgaaaaaaaaaaaatgcaagagtgattttctgttacattcaatttcaaactctctaattgtgggttttctcctgaagaattttttttcacatactttccaaaagaccaacaaatggatgttgacaacaacccaatgaaataacattttgcatatctgaaaagaagcattgaatataagccaaaagctttcactgaaggtttttttttcataaaaaaaaaaaaaaaaaaaaaaaaaaaaaaaaaaaa

SEQ ID NO: 483 - DNA, 653 bp, Homo Sapiens
tagaagatcactctggggggtagtcagtgatctccattttcatgacagttaatgaagtcgagcacatttccgaatatatgtttacatttgtcgtatctacatatcctcctttgtgaagggcctgttaagtcttttgcctgttttcctgttgggttacctgcctccttcttaatgttttatagttctttattttggagatgagtcacttattgactatgtatattggaagtatcttctactgtatggcttgcctttgatttttttagtcaactccttcgatggattgaagtttttaatcttcatataatctgactgatccttgttttcctttatgtttagctgcattaggttttgggttgctgtattagaaatcattacctgttcccagctcatgaaaatattctcctcttatttcttttaaaaatattatttgttcaacaattttttgatgtcatatttcacagatgtctcttagataccagctatatttcaatatccatttattgagaataatgacaagaagcttgggtaaagctttcaaacagatttgtagtatatacacagcagtgtctagtcatatgaaaagtagttagaagacattgggagatacttactcaatgtagaaagcatgctgtgtactccccatacagatc

SEQ ID NO: 484 - DNA, 246 bp, Homo Sapiens
tgatgccgtatatagccaaggggtgaggatattctaaacaaacaaaaattgaataatttattcacagaaactattaagattgtattgtaaagctcacagcaagctcagtgggcagcagctgcaacatctcaccggggaaattattttatttaacgtgagtgagatgtgggccggagaaggtagctgaagctatttataaaacgttgtgtaccttcttccgagctctctcccctttgtgaagggcgc

SEQ ID NO: 485 - DNA, 720 bp, Homo Sapiens
  misc_feature (625)..(625): n is a, c, g, or t
accacaatttaaaaggcaaagggaaggggaagcatattaaagggaagtgccaaaatcgtttcagacaaacgcattctcaggcataacttatttcggtttagtttaaggtttgaaataagagtatttcaaaaaccaccaagtttatgacatagcatctaattcagggaaggaaaaggggacaaatggaaagtgaaaagtctgaagtagccttagctagtcagaaacacttatgtgcagccacataaaacatttccaaggtctctcaccactgagttctccagtggcaagtcctctaagataaaactacagtgccaatatcaagagcacatgggattgcttgattggtgcaatacacataagctacaaaaatgtatgatttcttaggcctttgtttctgttcaggtaatcgatattcttctagagtttagtttgaaagacactttgtagagaacactggcatggacctatttctacagaagtggaaataaaattttgagtaaaatacagaaaaataagataaatattaactcttgatatgactgggctaaatttgcaaaacaatatcccctttattaagactagttcaagtttaatctacaaataggacaaacaagatcaatacagntccctgaaaataacttgataagtaatttctttcaagtaggaaaatttacgccatcaacctctgtagcacaaataagggaaggaaagtagatttaa

SEQ ID NO: 486 - DNA, 421 bp, Homo Sapiens
  misc_feature (309)..(309): n is a, c, g, or t
  misc_feature (356)..(356): n is a, c, g, or t
cacacctaccctccacctctccacctctgtggtgttcccatttgtgtgtttcccatctgtggagccagactgagcaatagcttagcagcgagtcagggacagctgccactttccacagagccacaggatgggcagagcagggacccagggaatgaatagccagtggacaaacagtcttgagctctgttcagccagagtgatgggccctgccagttaaggggctgtgtcttcatccttgaagacagatgtgcaatattgaccctgcctctccccagggctttgtggaaagattagttgagggctttagtngagatcacactcagagtggggcaattccagcattttatcctgggtgngttttcattgcatttgtctgtgaagtaataatttttgggccagaattgctccagtttgcatttgg

SEQ ID NO: 487 - DNA, 414 bp, Homo Sapiens
  misc_feature (391)..(391): n is a, c, g, or t
ttttttttttttttttttttttttaagttctcagcacccattgtaatttatttgtgaatgaatgggaaaagggtatcagtccaaggggagatcaggtggttcctcctcatcagagtcaaactcaacattttcatcttttacccatcgacctcgtccatctgggatccatccagagcttcgaagggtgagataatggtccagggctcgtcttcttgtggggctcatgggtgcaggggctgagacagttgctgactcctcggcctgtgggcaggccgcaggttcaggttccctactgatcttcccactttggagtttgacctctgagggtggcataggggaaagggagacagagggaccaggggcttctggtctgtacttccggcggcacaanctgttatagtggggagctctgtg

SEQ ID NO: 488 - DNA, 361 bp, Homo Sapiens
  misc_feature (297)..(297): n is a, c, g, or t
  misc_feature (317)..(317): n is a, c, g, or t
  misc_feature (323)..(323): n is a, c, g, or t
ggaacttgcctgtcaagacagttctttttgtaaacctaagaacctgagagcagggagattccagctgctaggagttaaataattcctttggcacttagcgtcctatcaaaacagagaagcaaaagaaaacaatgagagcaacaccaccacctcaaacaggtgccctgtgctgggccgtgtcctgagagtgcatagggagagacatcgagacatccacaagataatgcccatttcacttgatcttcttcatgtctgggggaaaccaagacacaggaaggttaatgaatgacctgcctnagggtctcagatagtcatgnggcagnatccctttcaagcctcaggagtttagctccggtgttcc

SEQ ID NO: 489 - DNA, 347 bp, Homo Sapiens
acgggttgatggaagtgttttattttcaaaaactagaagaatataagaactaaaatcaaagccaaggtctttcacacaacttccttcaagtattcaattagatagcaataataatagtattaacaagaaaaactcacctaaataagagtatacaagtttattttaaggtgttcatagggttaccagttggataggtcataataatatatagagatatgggaaattaagacctatgaagttttaattatttgcataagagtatgcccttgcatcataagaaaacatataaaaacagaaatatgtttcaaacttgtatataacatatatatacatgttcaacttgatca

SEQ ID NO: 490 - DNA, 1696 bp, Homo Sapiens
gctgtagctggtgagaggaagtcctagaggctatggacactctgctgctgggatcaccgagatgagcagcagctgctcagggctgagcagggtcctggtggccgtggctacagccctggtgtctgcctcctccccctgcccccaggcctggggccccccaggggtccagtatgggcagccagggaggtccgtgaagctgtgttgtcctggagtgactgccggggacccagtgtcctggtttcgggatggggagccaaagctgctccagggacctgactctgggctagggcatgaactggtcctggcccaggcagacagcactgatgagggcacctacatctgccagaccctggatggtgcacttgggggcacagtgaccctgcagctgggctaccctccagcccgccctgttgtctcctgccaagcagccgactatgagaacttctcttgcacttggagtcccagccagatcagcggtttacccacccgctacctcacctcctacaggaagaagacagtcctaggagctgatagccagaggaggagtccatccacagggccctggccatgcccacaggatcccctaggggctgcccgctgtgttgtccacggggctgagttctggagccagtaccggattaatgtgactgaggtgaacccactgggtgccagcacacgcctgctggatgtgagcttgcagagcatcttgcgccctgacccaccccagggcctgcgggtagagtcagtaccaggttacccccgacgcctgcgagccagctggacataccctgcctcctggccgtgccagccccacttcctgctcaagttccgtttgcagtaccgtccggcgcagcatccagcctggtccacggtggagccagctggactggaggaggtgatcacagatgctgtggctgggctgccccatgctgtacgagtcagtgcccgggactttctagatgctggcacctggagcacctggagcccggaggcctggggaactccgagcactgggaccataccaaaggagataccagcatggggccagctacacacgcagccagaggtggagcctcaggtggacagccctgctcctccaaggccctccctccaaccacaccctcggctacttgatcacagggactctgtggagcaggtagctgtgctggcgtctttgggaatcctttctttcctgggactggtggctggggccctggcactggggctctggctgaggctgagacggggtgggaaggatggatccccaaagcctgggttcttggcctcagtgattccagtggacaggcgtccaggagctccaaacctgtagaggacccaggagggcttcggcagattccacctataattctgtcttgctggtgtggatagaaaccaggcaggacagtagatccctatggttggatctcagctggaagttctgtttggagcccatttctgtgagaccctgtatttcaaatttgcagctgaaaggtgcttgtacctctgatttcaccccagagttggagttctgctcaaggaacgtgtgtaatgtgtacatctgtgtccatgtgtgaccatgtgtctgtgaaggccagggaacatgtattcctctgcatgcatgtatgtaggtgcctgggagtgtgtgtggtccttgctctggccctttcccttgcagggttgtgcaggtgtgaataaa

SEQ ID NO: 491 - DNA, 347 bp, Homo Sapiens
tttttttttttttttttggcttaaacaacaaaggtttatttcttgctcactacatatccattgtgggttggtggggtgggagtgggggattctgctcatcgcttaggaccccaggctggcagaggagggtttcaactggagagctgcttctatgtggcaacctggacccaggctctcaaagcttctgcccagaagtgaccctcggcggttctgctcatgctccactcgccggggcagccccgacctaacctcccagcaggcagcgcatcacatgttacaggtgcccacgagaggagaaactgcacctttgtcaacaaagactaccacggaggggagactgctgatgg

SEQ ID NO: 492 - DNA, 3523 bp, Homo Sapiens
tcgagcctggcggtagaatcttcccagtaggcggcgcgggagggaaaagaggattgaggggctaggccgggcggatcccgtcctcccccgatgtgagcagttttccgaaaccccgtcaggcgaaggctgcccagagaggtggagtcggtagcggggccgggaacatgaggcagtctctcctattcctgaccagcgtggttcctttcgtgctggcgccgcgacctccggatgacccgggcttcggcccccaccagagactcgagaagcttgattctttgctctcagactacgatattctctctttatctaatatccagcagcattcggtaagaaaaagagatctacagacttcaacacatgtagaaacactactaactttttcagctttgaaaaggcattttaaattatacctgacatcaagtactgaacgtttttcacaaaatttcaaggtcgtggtggtggatggtaaaaacgaaagcgagtacactgcaaaatggcaggacttcttcactggacacgtggttggtgagcctgactctagggttctagcccacataagagatgatgatgttataatcagaatcaacacagatggggccgaatataacatagagccactttggagatttgttaatgataccaaagacaaaagaatgttagtttataaatctgaagatatcaagaatgtttcacgtttgcagtctccaaaagtgtgtggttatttaaaagtggataatgaagagttgctcccaaaagggttagtagacagagaaccacctgaagagcttgttcatcgagtgaaaagaagagctgacccagatcccatgaagaacacgtgtaaattattggtggtagcagatcatcgcttctacagatacatgggcagaggggaagagagtacaactacaaattacttaatagagctaattgacagagttgatgacatctatcggaacacttcatgggataatgcaggttttaaaggctatggaatacagatagagcagattcgcattctcaagtctccacaagaggtaaaacctggtgaaaagcactacaacatggcaaaaagttacccaaatgaagaaaaggatgcttgggatgtgaagatgttgctagagcaatttagctttgatatagctgaggaagcatctaaagtttgcttggcacaccttttcacataccaagattttgatatgggaactcttggattagcttatgttggctctcccagagcaaacagccatggaggtgtttgtccaaaggcttattatagcccagttgggaagaaaaatatctatttgaatagtggtttgacgagcacaaagaattatggtaaaaccatccttacaaaggaagctgacctggttacaactcatgaattgggacataattttggagcagaacatgatccggatggtctagcagaatgtgccccgaatgaggaccagggagggaaatatgtcatgtatcccatagctgtgagtggcgatcacgagaacaataagatgttttcaaactgcagtaaacaatcaatctataagaccattgaaagtaaggcccaggagtgttttcaagaacgcagcaataaagtttgtgggaactcgagggtggatgaaggagaagagtgtgatcctggcatcatgtatctgaacaacgacacctgctgcaacagcgactgcacgttgaaggaaggtgtccagtgcagtgacaggaacagtccttgctgtaaaaactgtcagtttgagactgcccagaagaagtgccaggaggcgattaatgctacttgcaaaggcgtgtcctactgcacaggtaatagcagtgagtgcccgcctccaggaaatgctgaaaatgacactgtttgcttggatcttggcaagtgtaaggatgggaaatgcatccctttctgcgagagggaacagcagctggagtcctgtgcatgtaatgaaactgacaactcctgcaaggtgtgctgcagggacctttctggccgctgtgtgccctatgtcgatgctgaacaaaagaacttatttttgaggaaaggaaagccctgtacagtaggattttgtgacatgaatggcaaatgtgagaaacgagtacaggatgtaattgaacgattttgggatttcattgaccagctgagcatcaatacttttggaaagtttttagcagacaacatcgttgggtctgtcctggttttctccttgatattttggattcctttcagcattcttgtccattgtgtggataagaaattggataaacagtatgaatctctgtctctgtttcaccccagtaacgtcgaaatgctgagcagcatggattctgcatcggttcgcattatcaaaccctttcctgcgccccagactccaggccgcctgcagcctgcccctgtgatcccttcggcgccagcagctccaaaactggaccaccagagaatggacaccatccaggaagaccccagcacagactcccatatggacgaggatgggtttgagaaggaccccttcccaaatagcagcacagctgccaagtcatttgaggatctcacggaccatccggtcgccagaagtgaaaaggctgcctcctttaaactgcagcgtcagaatcgtgttaacagcaaagaaacagagtgctaatttagttctcagctcttctgacttaagtgtgcaaaatatttttatagatttgacctacaaatcaatcacagcttgtattttgtgaagactgggaagtgacttagcagatgctggtcatgtgtttgaacttcctgcaggtaaacagttcttgtgtggtttggcccttctccttttgaaaaggtaaggtgaaagtgaatctacttattttgaggctttcaggttttagtttttaaaatatcttttgacctgtggtgcaaaagcagaaaatacagctggattgggttatgaatatttacgtttttgtaaattaatcttttatattgataacagcactgactagggaaatgatcagtttttttttatacactgtaatgaaccgctgaatatgaagcatttggcatttatttgtgagaaaagtggaatagttttttttttttttttttttttttgccttcaactaaaaacaaaggagataaatttagtatacattgtatctaaattgtgggtctatttctagttattacccagagtttttatgtagcagggaaaatatatatctaaatttagaaatcatttgggttaatatggctcttcataattctaagactaatgctcagaacctaaccactaccttacagtgagggctatacatggtagccagttgaatttatggaatctaccaactgtttagggccctgatttgctgggcagtttttctgtattttataagtatcttcatgtatccctgttactgatagggatacatgtcttagaaaattcactattggctgggagtggtggctcatgcctgtaatcccagcacttggagaggctgaggttgcgccactacactccagcctgggtgacagagtgagatctgcctc

SEQ ID NO: 493 - DNA, 800 bp, Homo Sapiens
atggtgctgaggagagcatttcggtagaagacagttgcgcctgaagattgagtgtaaatcattcaaaccagtggttctcagtgttggctgtatacactttgtagtcactttggaatgttggaagacacatcgatgctgggttccgtatgccaagattctgatgttggtctggaatatgagctggtcataaggatttttaaaaactttctggtcatttcaatatgctgccaaggttgagaaccactgttgtaaaattcaccttgagttttctcatctgcaaaatagaaaaaaaaaaatccttgctccctcccttcatacctcacaaggatattgagggtaaaggagaaaataatgggaaagtgcttgtgccgtgcatgaaaagtgctattaaaagtcaaaggagtgttctgtttcaattcatagtatgatcagggaaagtgtaactgagtatactttgttgacttgggaaacctggagcactttctttggttggttaacgaagcatgcagatgtggaagcagacgttactataatccctactaatggtcttctgtcatactgagacaggctgtttaattacctggttttaccctagcgaccagaccgaaatattagggcttaaagtttgtaatgatcaatggttcataattccatttaactctttttcctacccagggaacacacacaccagaaaaataacacaacaaaggctacagcacaaacagcagacaaaaccgaaacaacaacacgagacagaggacgtaacaacaaaatcacacggggagatccaattactaaca

SEQ ID NO: 494 - DNA, 464 bp, Homo Sapiens
  misc_feature (374)..(374): n is a, c, g, or t
ttacacacatattatatacaacttttaaaatagctgcacaattttatatctcacttttagagaagtgcagtccaggcagaccatgcttctcaatatattaaaaatattaaataaaacccaaccagtttcatacttttctaatagtcaagctggctggaaaaaaaaggactggagaaagaacaggcagttgtaaaatgggatcagtcttcacaaacacactacttaaaaatcttgctatttccttatccctttgacagcatctctacaatctcacctttaaagctggaaataacacattgctaacttagagacaacatcgggtgcaacatgcatatgtcaactgcccactcaaccaactgcaaccctgaggattnttctggcccagtagaaagaggaaacacgaagataatctctgctgtagagctgcttctccagtttacgacttcatgtgttttcaggatgtt

SEQ ID NO: 495 - DNA, 324 bp, Homo Sapiens
gcggccgcccgcgagcggggcggtgccatttacggctccggaagaagcgacggaatctgctagggcacaagagagacgggcgctcgcgctctcgcagtcctcttccgtcagtgtcttttgcttcgactcccggcggagcgcgcaacgtggagtgacgtgcaggggccaagtgcaacccaggcagccacggctgtttcggagctcaggactctaaaatggcagagcagctttctccaggaaaggcggtggatcaggtgtgcaccttccttttcaaaaagcctgggcggaaaggggctgctggacgcagaaagcgcccggcctgcg

SEQ ID NO: 496 - DNA, 523 bp, Homo Sapiens
tttttttttttttttttgagatggagtcttgctctgtcgcccaggctggagtgcagtggcgcgatcttggctcactgcaagctccgcctcccaggttcacaccattctcctgccgcagcctcccaagtagctgggactacaggcgcctgccactgcgcccggctaatttttttttcgtatttttagtagagacggggtttcaccgcggtctcgatctcctgacctcgtgatccgctcgcctcggcctcccaaagtgctgggattacaggcgtgagccaccttgccggccttatcagataatttatttaaaagaaaagagagagagagagataaatgggtagattttcacaatgtatacaccaaaagaggacatcttttccgtgagtcagggaatatttaaagagatatcaaaagtccctattttcatgagttccacatcacatattttgtgctttctttgaatagccaaaaaattttcttggggaaaatacgagagtaaaaccagagctaaggagctataaga

SEQ ID NO: 497 - DNA, 604 bp, Homo Sapiens
gaaaattgtttctcaaaagcaaataagtaataaatctggtatctgcctataactcacagttgataagaaagtggccatttctcactagcattatatatgatttgggctctgggtaatttggaagtgttaggtttgtgtctttgtagcagtatttttattagaaaagaatctattggccttttacagggtattaatccctttgtcacctaccattgatgccttaagttttctgagtctcaattaaaaatcttccttttcttgatgcatgacaagtgtaatcagtacttgctcatttatttgtctgtatttagtttatgctgtactatttaattatccttccagcgtttttttttctccttacaaatatgatactctttagtgttaagctaaggcattgattcatgtatctgtccttataatgaattaataaactattttccagaaatgtggaattctcttttggaaaaaaaaaaaaaaaaaaaaaaaaaaaaaaaaaaactcgagggggggcccggtacccaattcgccctatagtgagtcgtattacaattcactggccgtcgttttacaacgtcttgactgggaaaaccctggcgtttcccaa

SEQ ID NO: 498 - DNA, 1115 bp, Homo Sapiens
tactgtcctttctctctccccggacagcatgagcttcaccacatcgctccaccttctccaccaactacctggtccctggtgctctgtccagtgcgcccagctaacggctgccctggcctggtcagcagctgctggccagcgtctatgcatgtgcgctgggtgctctggttccctggatctcctgtgtccctgctccaccatgcttcagtggtgctgtgccatggtgtgtcctggtggtgcctgtgccacctgtgtgatagccgtgtgtgtgtcttgtgcaggaatgtgtgaggcatccagaactgagaacggagaccatgcaaatgcctgaactgacctgcctggcctcttacctggacatgagtgatgtgagcctggatgacctgagaacctggacgtgctggacgagcaaaatcctgggagcactatggagaagaatgtggaccccagtgtcagagactggagccattacttcaagatcatcgaggacctgagggctcagatcttcgcaaatactgtggacaatgcccgcatcgtatctgcagattgacaatgcccgtcttgctgctgatgactttagagtcaagtctgagacagagctggccatgcgccagtctgtggagaacgacatccatgggctccgcaaggtcactgatgacaccaatatcacacgactgcagctggagacagagatcgaggctctcaaggaggaggctgctcttcatgacgacgaaccactcaagaggaagtacaaggcctacagcccagattgccagctctgggttgaccgtgcaggtagatgccccaaatcctcgaggacctcgcccagcatcatggcagacctccgggcccaatattacagctggctcaggaagacccgaaaagggagcaaagccacgaacagagacacaagccagaatttgcgagcgaagccccacgcgtgtatcccagcacaggtcctgggcaacggtagagcaccctctcagaacagacgccaaccaacgctcaagccacacaacaacacagtggcgagaacaccggtgcccgatgaaaacctagggccccagtagaaaccgtgagacgtgtgcaccgataccagccatgggtcgcaccgg

SEQ ID NO: 499 - DNA, 526 bp, Homo Sapiens
  misc_feature (98)..(98): n is a, c, g, or t
  misc_feature (245)..(245): n is a, c, g, or t
  misc_feature (304)..(304): n is a, c, g, or t
  misc_feature (355)..(355): n is a, c, g, or t
  misc_feature (379)..(379): n is a, c, g, or t
  misc_feature (405)..(405): n is a, c, g, or t
  misc_feature (414)..(414): n is a, c, g, or t
  misc_feature (443)..(443): n is a, c, g, or t
  misc_feature (470)..(470): n is a, c, g, or t
  misc_feature (477)..(477): n is a, c, g, or t
ctcctcagtccgctgaatggcgtccgtctcatacttggtcctccactgggccacctccgagttggccttggaaaggacgcgctgcagctcggccttgnctccgtctcctcctcgtactgctcccgcagcaggtcgcagtcatgccgggccgactgcagtgcgtgggccagggcgttcttcgccttaacctcctcctccagctgcctcttgaggtcctccagctgctgggtgtaggtgagcttgcntcgggtcagctgggaaattcagtgcctccttctcatccagctgccgggacagctcaccnattctcggtttgcaaactttgggccccgctggctggtgaaggtcgtttganagaacgcttggggtcttcctccgncttgcttccggtgctcaattcatctnggtctttcnaaaggttccgggaaaatcttcttcaaggntaagccttggccttgaatgatcttgcntcaatgnttgaaggtgaaggtaatcaagctccaagcttgaaatcggttcttttcct

SEQ ID NO: 500 - DNA, 438 bp, Homo Sapiens
aacaggtggggtcaagcagggagagagaactggccagggtataaaaagggcccacaagagaccggctctaggatcccaaggcccaactccccgaaccactcagggtcctgtggacagctcacctagtggcaatggctccaggctcccggacgtccctgctcctggcttttgccctgctctgcctgccctggsttcaagaggctggtgccgtccaaaccgttccgttatccaggctttttgaccacgctatgctccaagcccatcgcgcgcaccagctggccattgacacctaccaggagtttgaagaaacctatatcccaaaggaccagaagtattcattcctgcatgactcccagacctccttctgcttctcagactctattccgacaccctccaacatggaggaacggaacagaaatccaatctagagctgctccg

SEQ ID NO: 501 - DNA, 433 bp, Homo Sapiens
tccgttgatcagcccgctggagtactcataatctcgcccgtaaaatcgatcatagttttccctgtatcgatcatagaaattacggtagccccctctgtttccaggctgcccccagtactgctgcccgtaggcccggttgtcgtagcctcggcgctgcccgcccacatagccttggccccggcttcggttctgccggttacgcttgtttcggttgtttcggcgatttgtccgcttctcggaggggggcagaagcttccttgcctcctccttgtacttagtgacaatgggctgagcttcctccttctccagctccccatatgtcacctcatccatatagtcgcatttttcaggcaaagagaagttggctttcatctccagcattatagattcaggcacatcatctccctctacttccttcctcaactccagcgtg

SEQ ID NO: 502 - DNA, 399 bp, Homo Sapiens
tagattttaaaatgttatttcttaagtctattgtcaatctttacaattttattgtaaatcatagtgtgagatacagctgcaaatatagggaagtaagttcacaaactgttattttctaaagctaaagctaacattaggccttgctatggtagaactcttcactgggttgtttcttaaaaaaaattcacgcaactgacaggaggaattgtctttattcttgcattaatgataaatgtaatctacaagatggccttcatggattagaaaaaggaatcagaccacaaggaaaaagaaattgctggttttcactcaagatttatctagaaaagtgtactgactactggaataatagtttacccctgggttgtaccacagaatgagaaattctacaagattata

SEQ ID NO: 503 - DNA, 990 bp, Homo Sapiens
cgttaacccacaaaccccacccacacaaagggagtccacgccaccgtttgcattggaacctggcaactgagcattagaaggtacattgtgtaaatgggagcatagttgcaaatatatcagacaagggttcttacagttgcagccatttttaattaaagtaattggtgaaggaatcccaccaggaccaaggccttgagagcagattggacctattgattatgtgtatataaaaaacaagacatcttttaaagcaaagctgggcaaattctctatggaaagggcgccactggcacttgatttgtgactttccaaagtgcagcaatgtgttccagaacagctcaaatcctaaaaggtgaagttcaagttctttggtggcccagttgtcaagccacttaaatagcaaatcctgatggcttgaggatttcatttctccagcccagagcatattagcataagaagagtacaagtaatcaagcattctacacggtgtccaggtgaaaaccaatacaatcagcaatagtgtggtccagtttcagccatgaatatgaactatacaagacatatttaaaagataactcaaagttggaattgcattacccgtaactcaaatggggtctcaacattttccttaatctttaagacaatttatacaggacaaccaatataaaatagtaataatattcgttttaaaagtagtgtgaatgttacgagacctaaagactgatataggattcaaaagatggccttataccttagaaagttagaacctcaaaatccgtgtgtggaaaatgtcacttgcttctggtcggttacgtaaattaggtggcagatatctgaatactagaggcaaggcgaaattggactaaacttatgggggttatcacaagtactgaaagttaacattccaaaagttgtaatcaaacaaggtaaaacagacttctgtaaacaccccaaagacacccataaaagaaacgaaaaagtgataagaga

SEQ ID NO: 504 - DNA, 874 bp, Homo Sapiens
gggcgggaagacgtgcagcctgggccgtggctgctcactgcgttcggacccagacccgctgcaggcagcagcagcccccgcccgcgcacgagcatggagctctggggggcctacctcctcctctgcctcttctccctcctgacccaggtcaccaccgagccaccaacccagaagcccaagaagattgtaaatgccaagaaagatgttgtgaacacaaagatgtttgaggagctcaagagccgtctggacaccctggcccaggaggtggccctgctgaaggagcagcaggccctgcagacggtctgcctgaaggggaccaaggtgcacatgaaatgctttctggccttcacccagacgaagaccttccacgaggccagcgaggactgcatctcgcgcgggggcaccctgagcacccctcagactggctcggagaacgacgccctgtatgagtacctgcgccagagcgtgggcaacgaggccgagatctggctgggcctcaacgacatggcggccgagggcacctgggtggacatgaccggcgcccgcatcgcctacaagaactgggagactgagatcaccgcgcaacccgatggcggcaagaccgagaactgcgcggtcctgtcaggcgcggccaacggcaagtggttcgacaagcgctgccgcgatcagctgccctacatctgccagttcgggatcgtgtagccggcggggcgggggccgtggggggcctggaggagggcaggagccgcgggaggccgggaggagggtggggaccttgcagcccccatcctctccgtgcgcttggagcctctttttgcaaataaagttggtgcacgttcgcggagaggaaaaaaaaaaaaaaaaaaaaaaaaaa

SEQ ID NO: 505 - DNA, 500 bp, Homo Sapiens
  misc_feature (250)..(250): n is a, c, g, or t
  misc_feature (323)..(323): n is a, c, g, or t
  misc_feature (345)..(345): n is a, c, g, or t
  misc_feature (450)..(450): n is a, c, g, or t
  misc_feature (455)..(455): n is a, c, g, or t
ttttttttttttttttttaaattttaaaaaatagtttattttttaaaaccattaaggcaaaactgtaccctgaaattaactctgtacattcatcagtcttacagtaggacatcccaaacacagaagttcccatatattcaggatataaatcaatacatgtggtcagttcagtctcctaataggaaaacgaagacccaagatttttttttaaaattaaggttattttatagccattttctaattgcctggnaccaatcagttcatgtgactagaaaaattactttcgctcttctctgcacatccttgattccggagtcctgggntgcccgctccccccaccagggngagaggtatgaagttggagagaggatgctggggcctgtgtggcagttcctactttggaactgcacctttttaggcacaattaagaagctttaagccccaaattantgagngttaaggcactcatagtagagcactttgggagagttgggcccagt

SEQ ID NO: 506 - DNA, 512 bp, Homo Sapiens
gtctggctcacctggaggaagaggtccacgacaaggtggttgcccgggacctggttggagccatgttgagcccactgccgcagccacgcccctctgccccccaggtgctggcccaccccttcttttggagcagagccaagcaactccagttcttccaggacgtcagtgactggctggagaaggagtccgagcaggagcccctggtgagggcactggaggcgggaggctgcgcagtggtccgggacaactggcacgagcacatctccatgccgctgcagacagatctgagaaagttccggtcctataaggggacatcagtgcgagacctgctccgtgctgtgaggaacaagaagcaccactacagggagctcccagttgaggtgcgacaggcactcggccaagtccctgatggcttcgtccagtacttcacaaaccgcttcccacggctgctcctccacacgcaccgagccatgaggagctgcgcctctgagagcctcttcctgccctactac

SEQ ID NO: 507 - DNA, 466 bp, Homo Sapiens
gggacgccctggctgaggaggccacggggggcctactttgcagcccctcattgacccgactgtctttccttcctcagatcctgatctccgggagggacagatggccaatctctccccttccaaagcaggccctgctccccgggcagcctcccgccgaggggcccagcccccaacccacaggcagggaggggcatccctccctgccggcctcagggagcgaacgtggatgaaaaccacagggattccggacgccagaccccattttatacttcacttttctctacagtgttgttttgttgttgttggtttttattttttatactttggccataccacagagctagattgcccaggtctgggctgaataaaacaaggtttttctactctgtggctctgcatgcggcctgctggctggctggcagaccagctagtttgggcctgggggatgtccttaggcatcatcctt

SEQ ID NO: 508 - DNA, 716 bp, Homo Sapiens
gagcggcacagacgagatctcgatcgaaggcgagatggcggacgtgctagatcttcacgaggctgggggcgaagatttcgccatggatgaggatggggacgagagcattcacaaactgaaagaaaaagcgaagaaacggaagggtcgcggctttggctccgaggggtcccgagcgcggatgcgtgaggattatgacagcgtggagcaggatggcgatgaacccggaccacaacgctctgttgaaggctggattctctttgtaactggagtccatgaggaagccaccgaagaagacatacacgacaaattcgcagaatatggggaaattaaaaacattcatctcaacctcgacaggcgaacaggatatctgaaggggtatactctagttgaatatgaaacatacaaggaagcccaggctgctatggagggactcaatggccaggatttgatgggacagcccatcagcgttgactggtgttttgttcggggtccaccaaaaggcaagaggagaggtggccgaagacgcagcagaagtccagaccggagacgtcgctgacaggtcctctgttgtccaggtgttctcttcaagattccatttgaccatgcagccttggacaaataggactggggtggaacttgctgtgtttatatttaatctcttaccgtatatgcgtagtatttgagttgcgaataaatgttccatttttgttttctac

SEQ ID NO: 509 - DNA, 148 bp, Homo Sapiens
  misc_feature (134)..(135): n is a, c, g, or t
cccgtcacggcgtaatacgacggtgcaggaatattaacctgcttcccatcagctacgcatctctgcctcgccttaggggccgactcaccctacgccgatgaacgttgctgtaggaaaccttgtggctttacgcnncgatgcggggggt

SEQ ID NO: 510 - DNA, 147 bp, Homo Sapiens
tgatgcgggctgccacccgctcgctgccacaccacctgttctccattggggtccagccctgagatctgcaccgcctggaagcggggcacgcaggccaggaagccggcgacgctctcgcagccctcgggaaaggtgaccaggcggctg

SEQ ID NO: 511 - DNA, 524 bp, Homo Sapiens
  misc_feature (157)..(157): n is a, c, g, or t
  misc_feature (160)..(160): n is a, c, g, or t
  misc_feature (218)..(218): n is a, c, g, or t
  misc_feature (523)..(523): n is a, c, g, or t
gagattgcatcccacgcaggcagcccccttccgtacaagagaggctggcggttacctttcttggggagacgcgtccgactgcttcattgtgggggcctcaggagcggaggatcgggtcccgcccgaggtgacgcgtaaacccagactctcagcaacncgngtaggaaggacccttgaagttccgcggcgaccacgtcggcttgaaaccagcagcccanggacaagtggaccatgccagcaagacccagaccatccaaaccggctgatcctacgacaggacccagatgccagtgaaagtgaccacagccctgctctaagtcaccccggaagctgaccagtctacgcacggccgaagcgttcgtcaaggaagtaaatgtagttagaaatcttaagcccagtaattttccttgtcatcttaattgttttactattaacctgtcgctttgctcaaccccctcctctgggcaaacatctcttggtccatcctaggtacaaacatgctactcttcccctttgaaaaaant

SEQ ID NO: 512 - DNA, 2279 bp, Homo Sapiens
catctcccccaacctgggggtcgtgttcttcaacgcctgcgaggccgcgtcgcggctggcgcgcggcgaggatgaggcggagctggcgctgagcctcctggcgcagctgggcatcacgcctctgccactcagccgcggccccgtgccagccaaacccaccgtgctcttcgagaagatgggcgtgggccggctggacatgtatgtgctgcacccgccctccgccggcgccgagcgcacgctggcctctgtgtgcgccctgctggtgtggcaccccgccggccccggcgagaaggtggtgcgcgtgctgttccccggttgcaccccgcccgcctgcctcctggacggcctggtccgcctgcagcacttgaggttcctgcgagagcccgtggtgacgccccaggacctggaggggccggggcgagccgagagcaaagagagcgtgggctcccgggacagctcgaagagagagggcctcctggccacccaccctagacctggccaggagcgccctggggtggcccgcaaggagccagcacgggctgaggccccacgcaagactgagaaagaagccaagaccccccgggagttgaagaaagaccccaaaccgagtgtctcccggacccagccgcgggaggtgcgccgggcagcctcttctgtgcccaacctcaagaagacgaatgcccaggcggcacccaagccccgcaaagcgcccagcacgtcccactctggcttcccgccggtggcaaatggaccccgcagcccgcccagcctccgatgtggagaagccagcccccccagtgcagcctgcggctctccggcctcccagctggtggccacgcccagcctggagctggggccgatcccagccggggaggagaaggcactggagctgcctttggccgccagctcaatcccaaggccacgcacaccctcccctgagtcccaccggagccccgcagagggcagcgagcggctgtcgctgagcccactgcggggcggggaggccgggccagacgcctcacccacagtgaccacacccacggtgaccacgccctcactacccgcagaggtgggctccccgcactcgaccgaggtggacgagtccctgtcggtgtcctttgagcaggtgctgccgccatccgcccccaccagtgaggctgggctgagcctcccgctgcgtggcccccgggcgcggcgctcggcttccccacacgatgtggacctgtgcctggtgtcaccctgtgaatttgagcatcgcaaggcggtgccaatggcaccggcacctgcgtcccccggcagctcgaatgacagcagtgcccggtcacaggaacgggcaggtgggctgggggccgaggagacgccacccacatcggtcagcgagtccctgcccaccctgtctgactcggatcccgtgcccctggcccccggtgcggcagactcagacgaagacacagagggctttggagtccctcgccacgaccctttgcctgaccccctcaaggtccccccaccactgcctgacccatccagcatctgcatggtggaccccgagatgctgccccccaagacagcacggcaaacggagaacgtcagccgcacccggaagcccctggcccgccccaactcacgcgctgccgcccccaaagccactccagtggctgctgccaaaaccaaggggcttgctggtggggaccgtgccagccgaccactcagtgcccggagtgagcccagtgagaagggaggccgggcacccctgtccagaaagtcctcaacccccaagactgccactcgaggcccgtcggggtcagccagcagccggcccggggtgtcagccaccccacccaagtccccggtctacctggacctggcctacctgcccagcgggagcagcgcccacctggtggatgaggagttcttccagcgcgtgcgcgcgctctgctacgtcatcagtggccaggaccagcgcaaggaggaaggcatgcgggccgtcctggacgcgctactggccagcaagcagcattgggaccgtgacctgcaggtgaccctgatccccactttcgactcggtggccatgcatacgtggtacgcagagacgcacgcccggcaccaggcgctgggcatcacggtgttgggcagcaacggcatggtgtccatgcaggatgacgccttcccggcctgcaaggtggagttctagccccatcgccgacacgccccccactcagcccagcccgcctgtccctagattcagccacatcagaaataaactgtgactacacttg

SEQ ID NO: 513 - DNA, 2791 bp, Homo Sapiens
tgcgttggggtgaggccctcacttcatccggcgactagcaccgcgtccggcagcgccagccctacactcgcccgcgccatggtcttcatctctcgacctcgtgatgggccgccgcggcgggcgcgggcccggagatggtccgcgggcaggtgttcgacgtggggccgcgctacaccaacctctcgtacatcggcgagggcgcctacggcatggtgtgctctgcttatgataatgtcaacaaagttcgagtagctatcaagaaaatcagcccctttgagcaccagacctactgccagagaaccctgagggagataaaaatcttactgcgcttcagacatgagaacatcattggaatcaatgacattattcgagcaccaaccatcgagcaaatgaaagatgtatatatagtacaggacctcatggaaacagatctttacaagctcttgaagacacaacacctcagcaatgaccatatctgctattttctctaccagatcctcagagggttaaaatatatccattcagctaacgttctgcaccgtgacctcaagccttccaacctgctgctcaacaccacctgtgatctcaagatctgtgactttggcctggcccgtgttgcagatccagaccatgatcacacagggttcctgacagaatatgtggccacacgttggtacagggctccagaaattatgttgaattccaagggctacaccaagtccattgatatttggtctgtaggctgcattctggcagaaatgctttctaacaggcccatctttccagggaagcattatcttgaccagctgaaccacattttgggtattcttggatccccatcacaagaagacctgaattgtataataaatttaaaagctaggaactatttgctttctcttccacacaaaaataaggtgccatggaacaggctgttcccaaatgctgactccaaagctctggacttattggacaaaatgttgacattcaacccacacaagaggattgaagtagaacaggctctggcccacccatatctggagcagtattacgacccgagtgacgagcccatcgccgaagcaccattcaagttcgacatggaattggatgacttgcctaaggaaaagctcaaagaactaatttttgaagagactgctagattccagccaggatacagatcttaaatttgtcaggacaagggctcagaggactggacgtgctcagacatcggtgttcttcttcccagttcttgacccctggtcctgtctccagcccgtcttggcttatccgctttgactcctttgagccgtttggaggggcggtttctggtagttgtggcttttatgctttcaaagaatttcttcagtccagagaattcctcctggcagccctgtgtgtgtcacccattggtgacctgcggcagtatgtacttcagtgcaccttactgcttactgttgctttagtcactaattgctttctggtttgaaagatgcagtggttcctccctctcctgaatccttttctacatgatgccctgctgaccatgcagccgcaccagagagagattcttccccaattggctctagtcactggcatctcactttatgatagggaaggctactacctagggcactttaagtcagtgacagccccttatttgcacttcaccttttgaccataactgtttccccagagcaggagcttgtggaaataccttggctgatgttgcagcctgcagcaagtgcttccgtctccggaatccttggggagcacttgtccacgtcttttctcatatcatggtagtcactaacatatataaggtatgtgctattggcccagcttttagaaaatgcagtcatttttctaaataaaaaaggaagtactgcacccagcagtgtcactctgtagttactgtggtcacttgtaccatatagaggtgtaacacttgtcaagaagcgttatgtgcagtacttaatgtttgtaagacttacaaaaaaagatttaaagtggcagcttcactcgacatttggtgagagaagtacaaaggttgcagtgctgagctgtgggcggtttctggggatgtcccagggtggaactccacatgctggtgcatatacgcccttgagctacttcaaatgtggtttatacctcgcagatacaagaatctttatgaatatacaattctttttccttctacagcttagctccgtcttttcaaccacgaacatttaaaacccgacctactagcactgttctgtcctcaagtactcaaatatttctgatactgctgagtcagactgtcagaaaaagctagcactaactcgtgtttggagctctatccatattttactgatctctttaagtatttgttcctgccactgtgtactgtggagttgactcggtgttctgtcccagtgcggtgcctcctcttgacttccccactgctctctgtggtgagaaatttgccttgttcaataattactgtacccctcgcatgactgttacagctttctgtgcagagatgactgtccaagtgccacatgcctacgattgaaatgaaaactctattgttacctctgagttgtgttccacggaaaatgctatccagcagatcatttaggaaaaataattctatttttagcttttcatttctcagctgtccttttttcttgtttgatttttgacacgaatggagaatgggttatataaagactgcctgctattgacagaaatgcatttgtaattcatgaaaataaatgtacatcttctatcttcaaaaaaaaaaaaaaaaaaa

SEQ ID NO: 514 - DNA, 1694 bp, Homo Sapiens
gcggccgcgccccgccgccaccatgagggccgagggcctcggcggcctggagcgcttctgcagcccgggcaaaggccgggggctgcgggctctgcagcccttccaggtgggggacttgctgttctcctgcccggcctatgcctacgtgctcacggtcaacgagcggggcaaccactgcgagtactgcttcaccaggaaagaaggattgtccaaatgtggaagatgcaagcaggcattttactgcaatgtggagtgtcagaaagaagattggcccatgcacaagctggaatgttctcccatggttgtttttggggaaaactggaatccctcggagactgtaagactaacagcaaggattctggccaaacagaaaatccacccagagagaacaccttcggaaaaattgttagctgtgaaggagtttgaatcacatctggataagttagacaatgagaagaaggatttgattcagagtgacatagctgctctccatcacttttactccaagcatctcgaattccctgacaatgatagcctcgtagtactctttgcacaggttaactgtaatggcttcacaattgaagatgaagaactttctcatttgggatcagcgatatttcctgatgttgcattgatgaatcatagctgttgccccaatgtcattgtgacctacaaagggaccctggcagaagtcagagctgtacaggaaatcaagccgggagaggaggtttttaccagctatattgatctcctgtacccaacggaagatagaaatgaccggttaagagattcttatttctttacctgtgagtgccaggagtgtaccaccaaggacaaggataaggccaaggtggaaatccggaagctcagcgatcccccaaaggcagaagccatccgagacatggtcagatatgcacgcaacgtcattgaagagttccggagggccaagcactataaatcccctagtgagctgctggagatctgcgagctcagccaggagaagatgagctctgtgtttgaggacagtaacgtgtacatgttgcacatgatgtaccaggccatgggtgtctgcttgtacatgcaggactgggaaggagccctgcaatatggacagaaaatcattaagccctacagtaagcactatcctttgtactccctcaacgtggcctccatgtggttgaagctagggagactctacatgggcctggaacacaaagccgcaggggagaaagccctgaagaaggccattgcaatcatggaagtagctcacggcaaagatcatccatatatttctgagatcaaacaggaaattgaaagccactgaaactatgcagcatttcagttttcatttaaacacttagttcagaaaccttaaaggatttgaatatttcaaattgcacacgtcactccagcatctctgtaaaataattggaatgaaaatacttcttgcacttaaacactgcacatgccgtactttgaggttagtctgaatcttgaactttaataccaaattaattttgaatgcttttgtttcctaagagataatggcatggtttcatatgttatactttggacagagttttaaaaatggaattattttttctttcatgcctcttgtaatgttctgaacaaacttgaatgatgaaagtattaaagagatatcagtaaaaaaaaaaaaaaaaaaaaaaaaaaaa

SEQ ID NO: 515 - DNA, 614 bp, Homo Sapiens
aacgtttttaatcgtgttttattccattgccacagcctactctaccttttctaccaccccgcagtatctgcctctgggtccagggtcctttctgctccggcactgggggctctcaagaggtggggctgccacgtgggtggcctctccctggagctgagcccaccctgggggaccctggatcatgcccctttgcccccagcccttggtttgcagggaggccgcctggcgatgcccagcctgaaacagcacccctggcagggctgctcagtggcagctctcactttgtgctcaacaggaagcaatcagaaacacataccagaagccaaatctacgccaacaatttctcagacaacgaagaagcagagagcaaaatcaacatgatttggaaaaggaattttaaaccttagattaaaaaaagaaaacattttcacacagaagacttatctgctgtgagaaataaagagattagaacgcgtagaatataatgtttcagaccccagataatgataaaaatagatgtattctcgtgaaaaatctggactaaactattcaggcattcatggtattcaggattcatagcatgaagtgaaacaccaaagtatatatatattaaa

SEQ ID NO: 516 - DNA, 606 bp, Homo Sapiens
ggtccccctaatggaatcactaaattaaaaaataagctagaagaacttaagtccgttccttcagtttaccagtgatgactttgaacccaaggagttagtgtagagataatatcaaggctgggattacaggcgtgagccacagcgttcggccccaggaggaaaccttttattttttagcacaagaccacttcagtcaaactgggcgcccctttattttgttgggaaaaaattactgctgtctagattctaggaagtgaaactaatcgttatacagttatattgccatgttttaaaataactactatttaaatggtcttaattgtaggtctttgaaacactttagatgaagagatcacaggctgcttaagagtgttccaactaggtattgcagttttcaggtgcttcttaggtgttactattatttgaattgtgtatctgttcagttctgtgctaagcaaggcgatcttcagggagatttcccttccagctacctttggttggagtgttctaggtcacaataaaatgacttagaaaatgaactactcaagaaactaaatattagctccactgaaagagtaaaagtccgtgctgctatctcttacactg

SEQ ID NO: 517 - DNA, 295 bp, Homo Sapiens
gctgcacacattggctcgacatctgacgaggtgagcaggcttcgcaaatcggacgtggacctcgcagccgattgatggtgtgaccgggctgaacgcgtgttgataccgtcgaacatgtgactgccacatgctgacccgccttctgcgtacctacatgggcgcctaccgtcgcgagttgagtgcggtggttatccttcaattcgtcgccaccgcggcaatgctctacctgccgactctcaatgccgatatcatcgacaacggtgtggcacaaggcgataccggctacatcctgcag

SEQ ID NO: 518 - DNA, 2607 bp, Homo Sapiens
gaattcgggcagattagaccctggtcctacactcttagccgctgcctgcttttgacctttggctcatgggtacttgacgttttaaactcctaggcccaggatgaggaggagcttggctcccagccagctggccaagagaaaacctgaaggcaggtcctgtgatgatgaagactggcaacctggcctagtgactcctaggaaacggaaatccagcagtgagacccagatccaggagtgtttcctgtctccttttcggaaacctttgagtcagctaaccaatcaaccaccttgtctggacagcagtcagcatgaagcatttattcgaagcattttgtcaaagcctttcaaagtccccattccaaattatcaaggtcctctgggctctcgagcattgggcctgaaaagggctggggtccgccgggccctccatgaccccctggaaaaagatgccttggttctgtatgagcctcccccgctgagcgctcatgaccagctgaagcttgacaaggagaaactccctgtccatgtggttgttgaccctattctcagtaaggttttgcggcctcatcagagagagggagtgaaattcctgtgggagtgtgtcaccagtcggcgcatccctggcagccatggctgcatcatggctgatgagatgggcctaggaaagacgctgcagtgcatcacattgatgtggacacttttacgccagagtccagagtgcaagccagaaattgacaaggcagtggtggtgtcgccttccagcctggtgaagaactggtacaatgaggttgggaaatggctcggagggaggatccaacctctggccatcgatggaggatctaaggatgaaatagaccaaaagctggaaggattcatgaaccagcgtggagccagggtgtcttctcccatcctcatcatttcctatgagaccttccgccttcatgttggagtcctccagaaaggaagtgttggtctggtcatatgtgacgagggacacaggctcaagaactctgagaatcagacttaccaagccctggacagcttgaacaccagccggcgggtgctcatctccggaactcccatccagaatgatctgcttgagtatttcagcttggtacattttgttaattccggcatcctagggactgcccatgaattcaagaagcattttgaattgccaattttgaagggtcgagacgctgctgctagtgaggcagacaggcagctaggagaggagcggctgcgggagctcaccagcattgtgaatagatgcctgatacggaggacttctgatatcctttctaaatatctgcctgtgaagattgagcaggtcgtttgttgtaggctgacaccccttcagactgagttatacaagaggtttctgagacaagccaaaccggcagaagaattgcttgagggcaagatgagtgtgtcttccctttcttccatcacctcgctaaagaagctttgtaatcatccagctctaatctatgataagtgtgtggaagaggaggatggctttgtgggtgccttggacctcttccctcctggttacagctctaaggccctggagccccagctgtcaggtaagatgctggtcctggattatattctggcggtgacccgaagccgtagcagtgacaaagtagtgctggtgtcgaattacacccagactttggatctctttgagaagctgtgccgtgcccgaaggtacttatacgtccgcctggatggcacgatgtccattaagaagcgagccaaggttgtagaacgcttcaatagtccatcgagccctgactttgtcttcatgctgagcagcaaagctgggggctgtggcctcaatctcattggggctaaccggctggtcatgtttgaccctgactggaacccagccaatgatgaacaagccatggcccgggtctggcgagatggtcaaaagaagacttgctatatctaccgcctgctgtctgcagggaccattgaggagaagatcttccagcgtcagagccacaagaaggcactgagcagctgtgtggtggatgaggagcaggatgtagagcgccacttctctctgggcgagttgaaggagctgtttatcctggatgaagctagcctcagtgacacacatgacaggttgcactgccgacgttgtgtcaacagccgtcagatccggccaccccctgatggttctgactgcacttcagacctggcagggtggaaccactgcactgataagtgggggctccgggatgaggtactccaggctgcctgggatgctgcctccactgctatcaccttcgtcttccaccagcattctcatgaggaacagcggggcctccgctgataaccagctggtctgggtgtagctcttagaggaaggagatagggaaaaggggctccttgctccacagggccctgttgaattttgttctctgggagaaaatcatcaagaagggctgcatgatgtttgcccaaaatttattttataagaaaaacttttttggttaaaaaaaagaataaaggtatgaaagggctggtgacagtcagggatgcccccggcacacagggactaggtctagtgagaacatcaggagcagccagggatcc

SEQ ID NO: 519 - DNA, 224 bp, Homo Sapiens
ccgctgctgattatttgtgtggacagcaatctcccatcttgcaggcagaaaaggtcaagggagaagctctggactttgttacttaggcgtggaaagttagggtgttcctttcaatttagttctaagaagtaggcgtgaaacagccttaggttccctacctcctgaccctattctcctgcctcaaagggtgaacagataaaagaatagaaactgttcagtctgaa

SEQ ID NO: 520 - DNA, 3958 bp, Homo Sapiens
ggggggagacgagcaggtccgcgacgctgctgctgtgcctgctgggctgccacgtctggaaggcggtgacaagacgctgcgggagcccggcgccggagcccaagaggtgacgttaaaggtgcacatcagcgacgccagcacccaccagcccgtagcagatgcgctcatcgagatcttcaccaaccaggcctccatagcctctggcacctcggggactgatggcgtcgcctttatcaagttccagtataagctgggcagtcagttgattgtcaccgcctcgaagcatgcctacgtgccaaactctgccccatggaagccaatccggttacctgtattttcctctctgagccttggcctgcttccagaacgctctgccactctaatggtatatgaagatgtcgtccaaatagtatcaggattccaaggtgcccggccacagcctcgcgttcatttccagagaagggctctgaggttgcctgagaacaccagctacagtgacctgaccgcgtttctcacggccgccagctccccttcggaggtggacagttttccttatttgcgaggattagacggaaatggaacaggaaacagcaccaggcatgacctgaccccagtcacagccgtcagcgtccacttgctgagcagtaatggaacgccggtgctggtggatggtcccatctatgtcactgtgcccctggccacgcagagcagcctgaggcacaatgcctatgtcgcggcgtggcggtttgaccagaagctgggaacgtggctgaagagcggtctgggtcttgtgcaccaggaaggcagccagctgacgtggacatacattgccccccagttggggtactgggtggccgccatgtcccctcccatcccaggtcccgttgtaacacaggacattaccacgtatcacacggtgtttcttttggccattttaggaggaatggctttcatacttttggttttgctgtgtctccttttatattattgcaggaggaagtgcttgaaacctcgtcagcaccacagaaaactgcagctccctgcaggactggagagttccaaaagagaccagtccacgtccatgtcacacattaacttgctgttttcacgccgagcgtcagaattccctggcccgctgtccgtcaccagccacggccgccccgaggcccccggcacgaaggaactgatgagtggagtccatttggaaatgatgtctccgggcggcgaaggggacctgcacacccccatgctcaagctctcctacagcacctcccaggaatttagctcccgggaggagctcctctcttgcaaggaagaggataaaagccagatctcctttgataacctcactccaagtgggacgctggggaaagactaccataagtcagtggaggttttttccttaaaggcaagaaaatctatggaaagagaaggctacgagtcctcgggcatgatgactacaggggtagttacaacaccgtgctctcacagcctttatttgaaaagcaggacagagaaggtccagcctccacgggaagcaaactcaccattcaggaacatctgtaccccgcgccttcatcacctgagaaagaacagctgctggaccgcagacccactgaatgtatgatgtcgcgatcagtagatcacctcgagagacctacgtccttcccacggcccggccagttaatctgctgcagttctgtcgaccaggtcaatgacagcgtttacaggaaagtactgcctgccttggtcatcccggctcattatatgaaactccccggggaccactcctatgtcagccagcccctcgtcgtcccggctgatcagcagcttgagatagaaagactacaggctgagctgtccaatccccatgccgggatcttcccacacccgtcctcacagatccagccccagcccctgtcttcccaggccatctctcagcagcacctgcaggatgcgggcacccgggagtggagccctcagaacgcatccatgtcggagtctctctccatcccagcttccctgaacgacgcggctttggctcagatgaacagtgaggtgcagctcctgactgaaaaggccctgatggagcttgggggtgggaagccgcttccgcacacccgggcgtggttcgtctccttggatggcaggtccaacgctcacgttagacattcatacattgatctccaaagagctggaaggaacggaagtaatgatgccagtttggactctggcgtagatatgaatgaaccaaaatcagcccggaagggaaggggagatgctttgtctctgcagcagaactacccgcccgtccaagagcaccagcagaaagagcctcgagccccagacagcacggcctacacgcagctcgtgtacctggatgacgtggaacagagtggtagcgaatgtgggaccacggtctgtacccccgaggacagtgccctgcgatgcttgttggaggggtcgagtcggagaagtggtggccagctgcccagcctgcaggaggagacgaccagacggactgcggatgccccctcggagccagcagccagcccccaccagagaagatctgcccacgaggaagaggaagacgatgatgatgatgaccaaggagaagacaagaaaagcccctggcagaaacgggaggagaggcccctgatggcgtttaacattaaatgagctatcgcagacccacctgactgtggaatataaaattgccaaatatcctttctcatggaagcgcgtacccgttcgtggaggaaacggaacggcagcccagccgtgggacggacgtggacgtttactgcattcctgtttgccgtgtaaatgttagaaaggaattaaagttattactcggaataaaggatgactttggcggatgtcgcccctgcaaggaggtggctgaaagtggtgtccagatgtccttccgaggactcggcgtatccgccaccagggacattaagaaaccgcacgtgatgtcgctatgctctaacgatcacctcagttctccctcggattctgggaacagatgaaactttttgcatcgcttgagtcatttttatcacaataatcctactgtgaagctgtcgttgagaacttaggttggcacgtagcgtctcaaggtatgcgttctctcaaaggaaagctatgcatcgctgcttctttgtctgattttgcttagattttgctttggttaggttgcgttttggggtttgcctttttttgttgtcgcttaaatgcaatttggttgtaaagatttgattcctttgtgttcatctgttccgcttctcagcggtccatctcagcgtctcccttcaggaaccgctgagtgtcctctcttaacatccaagccttttaatgaaatcgtactgaaatctgtatcagctaagagtcctccaatcctggtcccattaactccaagtgcctttttgtcagtgacaacagacagtccctcgctttttgttgttgttggttttcttaacccctttaatggaactgcctggattttatacagttattaaaggatgtctcttttgctttaaactgcatgctgccaagtgccatttggggtcagcatcctcgtttcaacacagtgtgctctctagttatcatgtgtaacgtgggttctgtttagcgaagatagactagaggacacgttagagatgcccttccctgctccatccctgtggcaccattatggttttttggctgtttgtatatacggttacgtattaactctggaatcctatgggctcatcttgctcacccaatgtgggagtctggtttgagcaagcgagctgaatgtgactattaaaaaaaatttaaaaaaaaaaaagaaaatcttatgtactatccaaaagtgccagaatgactcttctgtgcattcttcttaaagagctgcttggttatccaaaaatgaaaattcaaaataaactctgaaaaaaaaaaaaaaaaaaaa

SEQ ID NO: 521 - DNA, 611 bp, Homo Sapiens
aagcttaacgagggacgttaccgggaagttgcaggcgggagggactcttccccatccagtcacctgacaggtcacaaacatgtcagacaaaagtgaattaaaggctgagttggaacgtaaggaagcagcgactggcccaaatcagagaggaaaagaagagaaaagaagaagaaagaaaaaaaaaaagaaacagaccagaagaaggaagctgtggctcctgtgcaagaagaatcagatcttgaaaaaaaaaggagagaagctgaagcattgcttcaaagcatggggctaactccagaatcccccattgtccctcctcctatgtctccatcctccaaatctgtgagcactccaagtgaagctggaaggccaagactctggagatggcgccgtgggatctagacgaggacctattaaactgggaatggctaaaatcacgcaagtggatttacctcctcgagaaatggccacgtatacaaaggaaactcagactccagttatggctcaacccaaagaagatgaagaggaagatgatgatgtagtggctcctaaaccacctattgaacctgaagaagagaaaactttaaagaaagatgaggaaaatgatagtaaag

SEQ ID NO: 522 - DNA, 218 bp, Homo Sapiens
  misc_feature (3)..(3): n is a, c, g, or t
gcntacgtgatcagttcgagggtgttgaaatcggtcatggggtgcagcttcatttacatgcggaacacgccgaagcggctcggctcgatgggggcgttcagcgaagcggacaaggccagggccagcacgtcgcgggtctgcaacggatcgatgacgccgtcgtcccacagtcgtgcgctggagtagtaggggtggccctgcgtttcgtactggtcgag

SEQ ID NO: 523 - DNA, 494 bp, Homo Sapiens
tggggtctaaaggtatgatggaatggtaacaaacgtaggaattaggctcgtttgttcagtttcttcttggcatccctgtttgatatttcttccctgggatacagtgcaggacagctgttacatgacagccttctgggggaaaaggagggaaaaggccagagagtgaccctccaagtttttatggtctgcttcagaggagaaaaagggtgaaggcaattctagtttttatggcttgctttaggggagaaaggcacaagagaaggtcaaagagaccctcctgcttctgctatcttctcagttttcaaactaccctatttctggacattatgttctgagccccaacaatgctaatgttaataatagaggaaactggctacaggatatatgtgaactcactctactatcttggcaatttttcagtaaacctaaaactgttattggagaacggataatgtttggttacatggtaagttctttagtggtgatttctgagg

SEQ ID NO: 524 - DNA, 450 bp, Homo Sapiens
  misc_feature (10)..(10): n is a, c, g, or t
  misc_feature (424)..(424): n is a, c, g, or t
cctctgcctntggaagaactgtgctatacaggaaaaagtgaacaaggtggaggaataggggttattctgcacagaagtcccatgaaaggaaaagcttattcaagctcaagacataaagatggaccctttatatatcttctctccattcttagtctgccttcaccttatctaacaaaaaacaacatgcagctactgagttgtatgtagagacatactcttggtgggccagggaaggtaaaaacagggaccagcaatgtcaagtttttgaactagaaaagtgggatgtttttagttttgtctataacctgtagctgggccaacccttgagaggacttgtgcaaagcatgtgtgcccagacccttcagactcctcagatatgggcctcaattacctaggaggtgtaggagttaccgtgggaggggcntcaataaggggggcaagcacacaggt

SEQ ID NO: 525 - DNA, 417 bp, Homo Sapiens
  misc_feature (78)..(78): n is a, c, g, or t
  misc_feature (125)..(125): n is a, c, g, or t
  misc_feature (313)..(313): n is a, c, g, or t
  misc_feature (327)..(327): n is a, c, g, or t
  misc_feature (368)..(368): n is a, c, g, or t
  misc_feature (374)..(374): n is a, c, g, or t
  misc_feature (381)..(381): n is a, c, g, or t
  misc_feature (387)..(387): n is a, c, g, or t
  misc_feature (397)..(397): n is a, c, g, or t
  misc_feature (406)..(406): n is a, c, g, or t
  misc_feature (413)..(413): n is a, c, g, or t
ggggagacttcaggagtcgctgtctctgaacttccagcctcagagaccgccgcccttgtccccgagggccatggcggngtctcagggcttgtgcctctcgcttcctgacgctcctggcgcatctngtggtcgtcatcaccttattctggtcccgggacagcaacatacaggcctgcctgcctctcacgttcacccccgaggagtatgacaagcaggacattcagctggtggccgcgctctctgtcaccctggggcctctttgcagtggagctggccggtttcctctcaggagtctccatgttcaacagcaacnagagcctcaatctncattgggggttcactgtagtggaatcccttgggcctgttcntttttnaaaattngaggcnttgggaattnaaatagganttggganaatt

SEQ ID NO: 526 - DNA, 624 bp, Homo Sapiens
cgcacgatggccgtccccgaagttacaggggctggtgaccgagcacgtcttcttactagacaagtgtcttcgagagaactctgacgtgaagacgcacgggccttttgaggccgtgatgcgcactctctgtgaatgcaaggggacagccagcaagaccctcagcaggttggggattcagccgtgccccatctgcctgggagatgcaaaggaccccgtctgtctgccctgcaaccacgtgcactgcctgcgctgcctcagggcctggtttgcctcagagcagatgatatgcccctactgtataactgccttgccagacgaattctctccagctgtttcccaagcgcacagggaagccattgaaaagcatgcccgcttccggcagatgtgcaccagttacttcgtagacctggtgtccaccattcgcttcaaggacaacgctccgcctgagaaggaagtgattgagagcctgctctctctcctcttcgtccaaaaggggcgcttaagagatgctgcccagagacactgtgaacacacaaaatctctctctccattcaatgatgttgtggataagactcctgtcatccgctcagtgatactgaaactgcttttgaagtacaggtttca

SEQ ID NO: 527 - DNA, 379 bp, Homo Sapiens
  misc_feature (12)..(12): n is a, c, g, or t
atcttgacagtnttatctgtacctcctcatgaggcagataacctagatcccagtgacgactcgttgggacaatcattttatgattacacagaaaagcaagcagtgcccatatcggtccccagatacaaacatgtggagcagaatggtgagaagtttgtggtatataatgtttacatggcagggaggcagctgtgttctaagcggtaccgggagtttgctatcctacaccagaacctgaagagagagtttgccaactttacatttcctcgactcccagggaagtggccattttcattatcagaacaacaattagatgcccgacgtcggggattggaagaatatctagaaaaagtgtgttcaatacgagtaattggtgaga

SEQ ID NO: 528 - DNA, 408 bp, Homo Sapiens
aggcagaggattatagggaaggtaatggtaatgggacaatatgtctgtgaccacgttcattacacatctgggatagagctctgactctttgatagaggactccagcaccccatctgtctgcccctgagaaacgaaagagaaccactctccactgtctactatatgttaggtactaggatttttctcattatagcacttcattcctttcgtgggggggactggattatttattttgagacagggcctcactctgccacccaggatggagtgcagtgcaaagcctcaaacaaaacgaaaacgaaacaaaacaaatatagtacttcatttaaccctttcaagcttggagccttagactaactgagaggttagactcaagccggtttgtctcactccaactcatatcaatct

SEQ ID NO: 529 - DNA, 1863 bp, Homo Sapiens
gggggccaaagggaagtgctgcgaggtttacaaccagctgcagtggttcgatgggaaggatctttctccaagtggttcctcttgaggggagcatttctgctggctccaggactttggccatctataaagcttggcaatgagaaataagaaaattctcaaggaggacgagctcttgagtgagacccaacaagctgcttttcaccaaattgcaatggagcctttcgaaatcaatgttccaaagcccaagaggagaaatggggtgaacttctccctagctgtggtggtcatctacctgatcctgctcaccgctggcgctgggctgctggtggtccaagttctgaatctgcaggcgcggctccgggtcctggagatgtatttcctcaatgacactctggcggctgaggacagcccgtccttctccttgctgcagtcagcacaccctggagaacacctggctcagggtgcatcgaggctgcaagtcctgcaggcccaactcacctgggtccgcgtcagccatgagcacttgctgcagcgggtagacaacttcactcagaacccagggatgttcagaatcaaaggtgaacaaggcgccccaggtcttcaaggccacaagggggccatgggcatgcctggtgcccctggcccgccgggaccacctgctgagaagggagccaagggggctatgggacgagatggagcaacaggcccctcgggaccccaaggcccaccgggagtcaagggagaggcgggcctccaaggaccccagggtgctccagggaagcaaggagccactggcaccccaggaccccaaggagagaagggcagcaaaggcgatgggggtctcattggcccaaaaggggaaactggaactaagggagagaaaggagacctgggtctcccaggaagcaaaggggacaggggcatgaaaggagatgcaggggtcatggggcctcctggagcccaggggagtaaaggtgacttcgggaggccaggcccaccaggtttggctggttttcctggagctaaaggagatcaaggacaacctggactgcagggtgttccgggccctcctggtgcagtgggacacccaggtgccaagggtgagcctggcagtgctggctcccctgggcgagcaggacttccagggagccccgggagtccaggagccacaggcctgaaaggaagcaaaggggacacaggacttcaaggacagcaaggaagaaaaggagaatcaggagttccaggccctgcaggtgtgaagggagaacaggggagcccagggctggcaggtcccaagggagcccctggacaagctggccagaagggagaccagggagtgaaaggatcttctggggagcaaggagtaaagggagaaaaaggtgaaagaggtgaaaactcagtgtccgtcaggattgtcggcagtagtaaccgaggccgggctgaagtttactacagtggtacctgggggacaatttgcgatgacgagtggcaaaattctgatgccattgtcttctgccgcatgctgggttactccaaaggaagggccctgtacaaagtgggagctggcactgggcagatctggctggataatgttcagtgtcggggcacggagagtaccctgtggagctgcaccaagaatagctggggccatcatgactgcagccacgaggaggacgcaggcgtggagtgcagcgtctgacccggaaaccctttcacttctctgctcccgaggtgtcctcgggctcatatgtgggaaggcagaggatctctgaggagttccctggggacaactgagcagcctctggagaggggccattaataaagctcaacatcaaaaaaaaaaaagaaaaaaaaaaaaaaaaa

SEQ ID NO: 530 - DNA, 600 bp, Homo Sapiens
  misc_feature (512)..(512): n is a, c, g, or t
  misc_feature (522)..(522): n is a, c, g, or t
  misc_feature (555)..(555): n is a, c, g, or t
  misc_feature (571)..(571): n is a, c, g, or t
  misc_feature (576)..(576): n is a, c, g, or t
  misc_feature (588)..(588): n is a, c, g, or t
  misc_feature (596)..(596): n is a, c, g, or t
ctggttagtagtatgtgaaactctggtataaaaacgtaaactagacagtagagccgatgaattaaaattgtaaattgctacattggcattttctacctccttttctgtcagagtattactttttccagcatttattcttatttgtgagtaaagaggaaatgggaacctgaggttaaaattgacatttttgtttcattgagaatttaagcagtaggtacaggagaagtgacttgtcacattaatttggtgcctaaatctgtaactacaacgttgtgatcgacatgtacaaaatgtctaagaaaggtcatatgctgaatattttacttttcctgtatagtctgcatgatttgtttcataaacccagcttatttcctccaaaaagcaaaatggtcctgtaatttttaaagtaaaataaacgtgccattttgtctgcaatctataatttcaggaagttattgaaagttctgacctcagggctttttaacagttcaagcaattgtcagttatatttnggaaactccnatctgggtaattctccagtggcctggaaagaantattaaccttgggcancactnttgagagctttntaaaaganggtt

SEQ ID NO: 531 - DNA, 712 bp, Homo Sapiens
gcctgtatgatgtggggtattagtttgcatttcactgctaagccatgctacctgtgtgcctgtcacaaagaggaagctccagatagttgctaaatgaaaggacaaactggggtagagttcctgcaacagcagtttgactactccactgatcctaccaagcagcctaactgtggctcagtttctcctctctggggaataggagtaactattgcttacccaacgaccctggaaaaacttacaagaaaaaacattaatttgtgtaaaaagacttaagccctttgaaagacatacttttttattttccacgtgtatctttaaacaatagttctagtggtcttagttttattaacacggtgtccacatcagaatcgtgaatcccatttccagttctgctgtccactatgggccataaggaagaaagaagcaacagaggaaagaaagctctatctcgcccgggcaatgggtggacttaaagatcagtgcatattccttggattggtttgtaaattgttcatgtatgtgtaatgtctggacaatgagaatccatagctttcatcagcttctcaaagtggactgcaaagaggacctactctagagaaacaaatgtgctcctgaaaaaactgtaaacaaactgtgaaatgttcaaatttcttttttacacgaccctcacatgtaaacccagaacccttccgtacaactgtgggtcacagat

SEQ ID NO: 532 - DNA, 4656 bp, Homo Sapiens
ggctggagcggcggcgggcaggcgtgcggaggacactcctgcgaccaggtactggctgtgatcgaacttctcaaccctcagagacttagatcttccacctcactccctcagccaagcctccaggccccctcgtgcatccgtggtggcctctctgccttctctgttctgttctccccatggcccagacatgagtggccccctagaaggggctgatgggggaggggaccccaggcctggggaatcattttgtcctgggggcgtcccatcccctgggcccccacagcaccggccttgcccaggccccagcctggccgatgacaccgatgccaacagcaatggttcaagtggcaatgagtccaacgggcatgagtctagaggcgcatctcagcggagctcacacagctcctcctcaggcaacggcaaggactcagccctgctggagaccactgagagcagcaagagcacaaactctcagagcccatccccacccagcagttccattgcctacagcctcctgagtgccagctcagagcaggacaacccgtccaccagtggctgcagcagtgaacagtcagcccgggcaaggactcagaaggaactcatgacagcacttcgagagctcaagcttcgactgccgccagagcgccggggcaagggccgctctgggaccctggccacgctgcagtacgcactggcctgtgtcaagcaggtgcaggccaaccaggaatactaccagcagtggagcctggaggagggcgagccttgctccatggacatgtccacctataccctggaggagctggagcacatcacgtctgagtacacacttcagaaccaggataccttctcagtggctgtctccttcctgacgggccgaatcgtctacatttcggagcaggcagccgtcctgctgcgttgcaagcgggacgtgttccggggtacccgcttctctgagctcctggctccccaggatgtgggagtcttctatggttccactgctccatctcgcctgcccacctggggcacaggggcctcagcaggttcaggcctcagggactttacccaggagaagtccgtcttctgccgtatcagaggaggtcctgaccgggatccagggcctcggtaccagccattccgcctaaccccgtatgtgaccaagatccgggtctcagatggggcccctgcacagccgtgctgcctgctgattgcagagcgcatccattcgggttacgaagctccccggataccccctgacaagaggattttcactacgcggcacacacccagctgcctcttccaggatgtggatgaaagggctgcccccctgctgggctacctgccccaggacctcctgggggccccagtgctcctgttcctgcatcctgaggaccgacccctcatgctggctatccacaagaagattctgcagttggcgggccagccctttgaccactcccctatccgcttctgtgcccgcaacggggagtatgtcaccatggacaccagctgggctggctttgtgcacccctggagccgcaaggtagccttcgtgttgggccgccacaaagtacgcacggcccccctgaatgaggacgtgttcactcccccggcccccagcccagctccctccctggacactgatatccaggagctgtcagagcagatccaccggctgctgctgcagcccgtccacagccccagccccacgggactctgtggagtcggcgccgtgacatccccaggccctctccacagccctgggtcctccagtgatagcaacgggggtgatgcagaggggcctgggcctcctgcgccagtgactttccaacagatctgtaaggatgtgcatctggtgaagcaccagggccagcagctttttattgagtctcgggcccggcctcagtcccggccccgcctccctgctacaggcacgttcaaggccaaggcccttccctgccaatccccagacccagagctggaggcgggttctgctcccgtccaggccccactagccttggtccctgaggaggccgagaggaaagaagcctccagctgctcctaccagcagatcaactgcctggacagcatcctcaggtacctggagagctgcaacctccccagcaccactaagcgtaaatgtgcctcctcctcctcctataccacctcctcagcctctgacgacgacaggcagaggacaggtccagtctctgtggggaccaagaaagatccgccgtcagcagcgctgtctggggagggggccaccccacggaaggagccagtggtgggaggcaccctgagcccgctcgccctggccaataaggcggagagtgtggtgtccgtcaccagtcagtgtagcttcagctccaccatcgtccatgtgggagacaagaagcccccggagtcggacatcatcatgatggaggacctgcctggtctagccccaggcccagcccccagcccagcccccagccccacagtagcccctgacccagccccagacgcctaccgtccagtggggctgaccaaggccgtgctgtccctgcacacgcagaaggaagagcaagccttcctcagccgcttccgagacctgggcaggctgcgtggactcgacagctcttccacagctccctcagcccttggcgagcgaggctgccaccacggccccgcacccccaagccgccgacaccactgccgatccaaagccaagcgctcacgccaccaccagaaccctcgggctgaagcgccctgctatgtctcacacccctcacccgtgccaccctccaccccctggcccaccccaccagccactacccccttcccagcggttgtccagccctaccctctcccagtgttctctcctcgaggaggcccccagcctcttccccctgctcccacatctgtgcccccagctgctttccccgcccctttggtgaccccaatggtggccttggtgctccctaactatctgttcccaaccccatccagctatccttatggggcactccagacccctgctgaagggcctcccactcctgcctcgcactccccttctccatccttgcccgccctccccccgagtcctcctcaccgcccggactctccactgttcaactcgagatgcagctctccactccagctcaatctgctgcagctggaggagctcccccgtgctgagggggctgctgttgcaggaggccctgggagcagtgccgggcccccacctcccagtgcggaggctgctgagccagaggccagactggcggaggtcactgagtcctccaatcaggacgcactttccggctccagtgacctgctcgaacttctgctgcaagaggactcgcgctccggcacaggctccgcagcctcgggctccttgggctctggcttgggctctgggtctggttcaggctcccatgaagggggcagcacctcagccagcatcactcgcagcagccagagcagccacacaagcaaatactttggcagcatcgactcttccgaggctgaggctggggctgctcggggcggggctgagcctggggaccaggtgattaagtacgtgctccaggatcccatttggctgctcatggccaatgctgaccagcgcgtcatgatgacctaccaggtgccctccagggacatgacctctgtgctgaagcaggatcgggagcggctccgagccatgcagaagcagcagcctcggttttctgaggaccagcggcgggaactgggtgctgtgcactcctgggtccggaagggccaactgcctcgggctcttgatgtgatggcctgtgtggactgtgggagcagcacccaagatcctggtcaccctgatgacccactcttctcagagctggatggactggggctggagcccatggaagagggtggaggcgagcagggcagcagcggtggcggcagtggtgagggagagggctgcgaggaggcccaaggcggggccaaggcttcaagctctcaggacttggctatggaggaggaggaagaaggcaggagctcatccagtccagccttacctacagcaggaaactgcaccagctagactccattctgggaccatctccaggagtccatgagaggctttcttctcctatgtcccaattctcagaactcagatgtggctagaccaaccagtgggaaactgccccagcttctcccaccatagggggccggacccccatcaccagcctaggatccaggggctgcctctggcctcttagggagcagagagcagaactccgcagcccagcccagaggagtgtcacctcccacctttggagaggaatccttccctcccctggacaaagttgctgacaagctgctgaagtggcctctccatattccagctgagcctgaatctgactcttgagggttggggctgcacttatttattgcggggagacagctctctctcccacctcctccccagatgggaggagagcctgaggcccaagcaggacccgggggttccagcccctagctgctctggagtgggggaggttggtggaccatggagtccctggtgctgcccctcaggtgggacccaggggttctcagctgtaccctctgccgatggcatttgtgtttttgatatttgtgtctgttactacttttttaatacaaaaagataaaaacgcc

SEQ ID NO: 533 - DNA, 254 bp, Homo Sapiens
tgtgtgtgtgtagttcatcagccagctacacatgaggaccaaaatgcttcagtctaaaatggaagatacacatttttttccttcaaattgtaattgagaactgaagtagcttttttatggagttaaatgtaatctttctgtgaaccagtctttgttgtattttatatttcttaggacacagatttctagttgaccacttaacatttgtaactgatgatgtgttgaccttttttttttttttttgccaaactaga

SEQ ID NO: 534 - DNA, 530 bp, Homo Sapiens
tcggggacggtagatggcccagccccaagtgttccgatcttcctgcccaaacatattctgtgacggaaagcctatgttgacctcgtccggcactcaaggcgtgggcagcggcctaacgtctgctgcgggaacacagtcgcgttgaatgctattctcaagacagacaaaacagtgggaagacactacgccaagctgctaactccctggccattgccggactctttcacccccatggactttccgctggcattttaaacaacatagtttcttttctctgtctctttctctttctctctctctttctctttctctctctctctctctctctctgtcaatctcataatttctctctctcgtgccacgttcccacccaacgctctctcgcccacttctactggggcccacttcctctcccgctctctctgtctcaacgtgattgactttcttgtgctgcccaggacttcttgcccacgtgcgccttcaaaacggtaagagctgcaactgaacgtgtgagacatggtgcagatagg

SEQ ID NO: 535 - DNA, 2392 bp, Homo Sapiens
gcggagcgcgcgctcccagcgaaagcagcagggcagggatctgcgttggaggaagggactgctctggtgctagaatgctgtgcgtcggaaggctgggcggcttgggagccagagcagcagctctgccgccccgccgggcgggccggggaagcctcgaagccgggatccgggcccgaagggtcagcaccagctggtctcccgtgggcgccgccttcaatgtcaagccccagggcagccgcttggacctgttcggcgagcgggcgcgtctttttggagttcctgagctgagtgccccagaaggatttcatattgcacaagaaaaagccttgagaaagacagaattgcttgtggaccgtgcatgttccaccccacctgggccccagaccgtgctgatcttcgatgagctctcggattccttatgcagagtggccgacttggctgattttgtgaaaatcgctcaccctgagccagcattcagagaagctgcggaagaagcttgtagaagtattggcaccatggtagagaagttgaacacaaatgtggatttatatcaaagtttgcaaaaattactagctgataaaaaacttgtggattcccttgatccagaaacaaggcgagtggctgaactgtttatgtttgattttgaaattagtggaatccatctagacaaacaaaagcgtaaaagagcagtggacctcaatgttaaaatcttggatttgagtagtacatttcttatgggaaccaattttcccaacaagattgagaagcatctcttaccagaacacattcgtcgtaactttacatctgctggggatcatatcataattgatggtctccacgcagaatcaccagatgacttggtgcgagaagctgcttataaaatttttctttatcccaatgctggtcaattgaaatgtttagaagaattgctcagcagcagagatcttctggcaaagttggtggggtattccacgttttctcacagggctctccaaggaacgatagctaaaaatccagagactgtcatgcagttccttgaaaaactatctgacaaactttctgaaagaactctgaaagattttgagatgatacgagggatgaaaatgaaactgaatgctcaaaattccgaagtaatgccctgggaccccccttactacagtggtgtgattcgtgcagaaaggtataatattgagcccagcctatattgcccgtttttctctcttggagcatgcatggaaggcctgaatattttgcttaacagactgttggggatttcattatatgcagagcagcctgcaaaaggagaggtgtggagcgaagatgtccgaaaactggctgttgttcatgaatctgaaggattgttggggtacatttactgtgatttttttcagcgagcagacaaaccacatcaggattgccatttcactatccgtggaggcagactaaaggaagatggagactatcaactcccacttgtagttcttatgctgaatcttccccgttcctcaaggagttctccaactttgctaactcctggcatgatggaaaatcttttccatgaaatgggacatgccatgcattcaatgctaggacgtactcgttaccaacacgtcactgggaccaggtgccctactgattttgctgaggttccttctattctgatggagtactttgcaaatgattatcgagtagttaaccaatttgccagacattatcagactggacagccactgccaaaaaatatggtgtctcgtctttgtgaatctaaaaaggtttgtgctgcagctgatatgcaacttcaggtcttttatgccactctggatcaaatctaccatgggaagcatcccctgaggaattcaaccacagacattctcaaggaaacacaagagaaattctatggcctaccatatgttccaaatactgcctggcagctgcgattcagccacctcgtggggtatggtgctagatattactcttacctcatgtccagagcggtcgcctccatggtttggaaggagtgttttctacaggatcctttcaacagggctgccggggagcgctatcgcagggagatgctggcccacggtggaggcagggagcccatgctcatggttgaaggtatgcttcagaagtgtccttctgttgatgacttcgtaagtgccctcgtttccgacttggatctggacttcgaaactttcctcatggattctgaataaaagaaacactctacacctctaatcaaggtcatgtagtaatgactttgttataaatgctacagctgtgagagcttgtttctgattgtttcattgttcgcttctgtaattctgaaaaactttaaactggtagaacttggaataaataatttgttttaattaaaaaaaaaaaaaaaaaa

SEQ ID NO: 536 - DNA, 475 bp, Homo Sapiens
  misc_feature (9)..(9): n is a, c, g, or t
gagctcggntccctctgttttcccttgttgaccttgagccactcacagagtgggaaaggtttgcctattgaacgaaaacagtcctccttccatgatttcccctttgctcccatgttcatccatgtgggctgctgtaacaaaatcccataaactgggtggtttacaaacaacaaaaatttatttctcatagttctcaaagctaaaagtccaagatcaatgcgctgggagatttggtgtctggtgagaacctgcttcttggttcagtgtcttcttaccgcgtcctcacgtggaggaaggggcgagaaagctttctggagcctcttatgtcaaggcactaatcccattcatgaggactccacactcgtgactggatcgcctcccaaagcccctacctccaaatcccatcaccttgagggttaggatttcaactatgaactttggggagacaccgacattcagactgtagcagctcccc

SEQ ID NO: 537 - DNA, 688 bp, Homo Sapiens
gggtggtggagctattgttagctcgaggggcaaataaagagcacaggaatgtttctgattacacacctctaagtctggctgcttctggtggctatgtgaacatcatcaaaatattactaaatgcaggagctgagattaactctagaactggtagcaaattgggcatctctcctctgatgttagcagctatgaatgggcatacagctgctgttaagctcctgttagacatgggctctgacataaatgctcagataggaaccaatcggaacactgcccttactttagcctgcttccaaggaagaactgaagtggttagtcttctgcttgatagaaaagcaaatgttgaacacagagctaagactggtctcacaccactaatggaagctgcctctggtggatatgcggaggtgggccgagttcttttggataaaggtgctgatgttaatgccctccagttccctcctcaagagatacagctttaaccatagcagcagataaagggcattacaaattctgtgagcttcttattggcaggggagctcatattgatgtacgtacaagaaggggacactcattgtggctagcagcaatggtggacactcgatgtggttcagtactggtgcagcagtgcagatgtgatgcagcgataccgcagatactctctatggcagcattagaagggtcatgt

SEQ ID NO: 538 - DNA, 577 bp, Homo Sapiens
acctttccctgcatttgagagttagttgcagtaatcagtgacactttacctctaaatactttaattagtatgcatctcttgttgttgttgttgttgttgtttgagacagggatcttgctttgtcacccaggctgaagtgcactggcatgatcatagcttagtgtaaccttgaactcctgggctccagcaggtcctcccacctcagcctccctagtagctaggactgcaagcactcaccaccacacccagctaattttaattttaattttgtagtgatgggggtcttgctatgttgcccaagctggtctcaaactcttgacctcaagagatccttctctcttggcctccccaagtgctggaattgagccactgagcttgatcagtgtgtatctcttaagaacaagatcattctcctacaaaattgtaacaccattattatactcaagaaatttaacattaatgccaatactattatctagtatacaatccacattcacatttcctcagttgttccagtagtatcctttgtatctcttttttggcgtaaaggatccaattaagcatcatacgttgcatc

SEQ ID NO: 539 - DNA, 386 bp, Homo Sapiens
  misc_feature (22)..(22): n is a, c, g, or t
  misc_feature (304)..(304): n is a, c, g, or t
gccaaatggtgcgacaggaggngctgcagccgcggccgcagcgcccgcacggagaggcttgaggcggctcctggcgtcgcccagagggagcgactagacgaacagtccggtgagggcggcgagaggaagcccgctacgagtgccctagctccccgccgctctcgatgaaccggacggaataagccgcgcctccagcaggggctgcgcctccatgaatccctagttgttttttttttttctttctctcccctctcctcacccccaccccgagccccgtcccgccttctcccttcgccagaggggnccgcgtccaggtgcggagtccataccggagcgcaatgggtccaaccccgaacgggggagattctgctcacggaactgcaggg

SEQ ID NO: 540 - DNA, 360 bp, Homo Sapiens
ccggactgaaaacgacatagaggcaggaggatgctgagcctgggagttgaggctacagtgagctgtgattgtgccatgcactccagcctgagtgacagagcaagactgttttgccctgaagtctctttcttctgttctgcagtggggagctgaggttgtgctacctcagttctcatctcttcaccagcaaaaactccacaattattttgtcttttcttctttcttttttcaaagccctcttctcacttccctcacccttgtaatgggcctagatttgggagttcacgaagaatcaggatcatgatcataattataatcacagctggccttacatgtcctaaccaaggactgggcactgta

SEQ ID NO: 541 - DNA, 376 bp, Homo Sapiens
gaccaccaagttacgtcaaagtctcaggaccagctccggtctccatagaggctgggtcagcagtgggcaaaacaacttcctttgctgggagctctgcttcctcctacagcccctcggaagccgccctcaagaacttcaccccttcagagacaccgaccatggacatcgcaaccaaggggcccttccccaccagcagggaccctctttcttctgtccctccgactacaaccaacagcagccgagggacgaacagcaccttagccaagatcacaacctcagcgaagaccacgatgaagcccccaacagccacgcccaccactgctcggacgaggccgaccacagacgtgagtgcaggtgaaaatggaggtttcctcct

SEQ ID NO: 542 - DNA, 466 bp, Homo Sapiens
  misc_feature (405)..(405): n is a, c, g, or t
  misc_feature (426)..(426): n is a, c, g, or t
aagagtatcaaaggttcctaaggaaaagaaagcagtgcttttatttgacttgttccaaattaaacactccgccttgtgactcagcaatgctatctaccttcacactcctgagctccgccttcctttgttttgatacagtcattatatttgattagtattcccaggaatacccccacctagttactcaaatatttttcacttaactttttatactcttattttggtaataagcttacaatattaagaagctggggacttttttttaactgaagacttgagtcccctataccgggaatgcagctattaatagattcccatattttaaaaggaggggaaagggacaatttaataaaaatttctgtttgtgcatttctgacagggccattattatctggctttgacaangcctttctggaaacgcgtgtnacaatggatcttaatggtgttatggaaacgagcttgcggg

SEQ ID NO: 543 - DNA, 217 bp, Homo Sapiens
tcctcaggtgtgctgataacatcaccttttaaggaggtggagctgaagatggagggattggggccagacgccaggtgtgtgtagaggggaggggctttccctctgttcagaggctatcactgccccaatgcctttggcagaaaacattgatttgatgtgaacacaagtaacatctctcctcagggtgtgttgataaccattgcaacacggtctctca

SEQ ID NO: 544 - DNA, 723 bp, Homo Sapiens
atgaatcggacgagggcggcgctagacttcgtagggttagcgaaattgaggtttctggtattgcgcgtttctcttccttgctgactctccgaatggccatggactcgtcgcttcaggcccgcctgtttcccggtctcgctatcaagatccaacgcagtaatggtttaattcacagtgccaatgtaaggactgtgaacttggagaaatcctgtgtttcagtggaatgggcagaaggaggtgccacaaagggcaaagagattgattttgatgatgtggctgcaataaacccagaactcttacagcttcttcccttacatccgaaggacaatctgcccttgcaggaaaatgtaacaatccagaaacaaaaacggagatccgtcaactccaaaattcctgctccaaaagaaagtcttcgaagccgctccactcgcatgtccactgtctcagagcttcgcatcacggctcaggagaatgacatggaggtggagctgcctgcagctgcaaactcccgcaagcagttttcagttcctcctgcccccactaggccttcctgccctgcagtggctgaaataccattgaggatggtcagcgaggagatggacagagcaagtccattccatcccgaggcagctcttctgcaaccctgtgaactcagttcggaggacatatgtctgtgagggagtggcaaatgagaccacggaaaaaaaagcccgaacctgatgg

SEQ ID NO: 545 - DNA, 456 bp, Homo Sapiens
cggcacgagaggaagatgggagggaattatcttgcccatggtcgtgcattcagggatttaacatttacagttttagctacttgccaggaactggaccatctatggcatgaagggattagtcacattactgatgattattagttgcttgtattcagtgcctgacactgtgcaaagcgcattatatgcgttactttcttcttcacagccacgcttttggtgtttccccattttacaggtgaggattcgggttcaaacatgtcaattttcctaaagatgcatagctggtacttagtggactcaattcagctctgtttagcagcaaagtttggttgtgaccacttcattcaattaaagcctgtgtgctggcacaagtcatttaactagtgcagacgttcttaaccctggctgcacctgagaaatctgcatgggtttataaaaacaaaccaaatgtgatgt

SEQ ID NO: 546 - DNA, 322 bp, Homo Sapiens
gagtcaccgccgccgcgcgccagagagaagcagcctccggccccggcggcccctgtctcccgaccccggaaggcgaatccctccgccggggaccccgcgcgtgggcgcttgaagccgagaccagcctgcccgggcctgggcaggcggagcagggccttggaccccgcggcgcccctcggcctcggagcaacgagcgcagcgccgcctctgaagagccaatccattcaggatgggaaaccacgcaggcaaacgagaattaaatgccgagaaggccagtacgaatagtgaaactaacagaggagaatctgaaaaaaagagaaac

SEQ ID NO: 547 - DNA, 4307 bp, Homo Sapiens
cctcagcctggggagctgaaggggagacgcgtctgggtggggctgctcggagcccgggcctggtggcccctggggctcccgggcgggcagggtagggcagagtagagcgggcttcaacatgatggcggccgaggccggcagtgaggagggcggcccggtaacagccggagctggaggaggcggcgcggcagcgggctccagtgcctatcccgcagtgtgtcgggtgaagatacccgcggccctgcctgtggcagccgccccctatcctgggctggtggagaccggagtggctggaactctgggtggcggagccgctttggggtcagagttcctaggagccgggtctgtggcaggggcactggggggagctggactgacagggggaggtactgctgctggcgtagctggtgctgctgctggcgtggccggtgctgctgttgctggacctagtggagacatggctctcaccaaactgcccacttcgttgcttgctgagactctcgggccaggcggcggttttccccctctgccccctcccccttacctgccccctttgggggcgggcctcgggacagtggacgaaggtgactctctggatggaccagaatacgaggaggaagaggtggccataccgttgaccgctcctccaactaaccagtggtatcacggaaaacttgacagaacgatagcagaagaacgcctcaggcaggcagggaagtctggcagttatcttataagagagagtgatcggaggccagggtcctttgtactttcatttcttagccagatgaatgttgtcaaccattttaggattattgctatgtgtggagattactacattggtggaagacgtttttcttcactgtcagacctaataggttattacagtcatgtttcttgtttgcttaaaggagaaaaattactttacccagttgcaccaccagagccagtagaagatagaaggcgtgtacgagctattctaccttacacaaaagtaccagacactgatgaaataagtttcttaaaaggagatatgttcattgttcataatgaattagaagatggatggatgtgggttacaaatttaagaacagatgaacaaggccttattgttgaagacctagtagaagaggtgggccgggaagaagatccacatgaaggaaaaatatggttccatgggaagatttccaaacaggaagcttataatttactaatgacagttggtcaagtctgcagttttcttgtgaggccctcagataatactcctggcgattattcactttatttccggaccaatgaaaatattcagcgatttaaaatatgtccaacgccaaacaatcagtttatgatgggaggccggtattataacagcattggggacatcatagatcactatcgaaaagaacagattgttgaaggatattatcttaaggaacctgtaccaatgcaggatcaagaacaagtactcaatgacacagtggatggcaaggaaatctataataccatccgtcgtaaaacaaaggatgccttttataaaaacattgttaagaaaggttatcttctgaaaaagggcaaaggaaaacgttggaaaaatttatattttatcttagagggtagtgatgcccaacttatttattttgaaagcgaaaaacgagctaccaaaccaaaaggattaatagatctcagtgtatgttctgtctatgtcgttcatgatagtctctttggcaggccaaactgttttcagatagtagttcagcactttagtgaagaacattacatcttttactttgcaggagaaactccagaacaagcagaggattggatgaaaggtctgcaggcattttgcaatttacggaaaagtagtccagggacatccaataaacgccttcgtcaggtcagcagccttgttttacatattgaagaagcccataaactcccagtaaaacattttactaatccatattgtaacatctacctgaatagtgtccaagtagcaaaaactcatgcaagggaagggcaaaacccagtatggtcagaagagtttgtctttgatgatcttcctcctgacatcaatagatttgaaataactcttagtaataaaacaaagaaaagcaaagatcctgatatcttatttatgcgctgccagttgagccgattacagaaagggcatgccacagatgaatggtttctgctcagctcccatataccattaaaaggtattgaaccagggtccctgcgtgttcgagcacgatactctatggaaaaaatcatgccagaagaagagtacagtgaatttaaagagcttatactgcaaaaggaacttcatgtagtctatgctttatcacatgtatgtggacaagaccgaacactactggccagcatcctactgaggatttttcttcacgaaaagcttgaatcgttgttgttatgcacactaaatgacagagaaataagcatggaagatgaagccactaccctatttcgagccacaacacttgcaagcaccttgatggagcagtatatgaaagccactgctacacagtttgttcatcatgctttgaaagactctattttaaagataatggaaagcaagcagtcttgtgagttaagtccatcaaagttagaaaaaaatgaagatgtgaacactaatttaacacacctattgaacatactttcagagcttgtggagaaaatattcatggcttcagaaatacttccaccgacattgagatatatttatgggtgtttacagaaatctgttcagcataagtggcctacaaataccaccatgagaacaagagttgttagtggttttgtttttcttcgactcatctgtcctgccatcctgaatccacggatgttcaatatcatctcagattctccatctcctattgctgcaagaacactgatattagtggctaaatctgtgcagaacttagcaaatcttgtggaatttggagctaaggagccctacatggaaggtgtcaatccattcatcaaaagcaacaaacatcgtatgatcatgtttttagatgaacttgggaatgtacctgaacttccggacactacagagcattctagaacggacctgtcccgtgatttagcagcattgcatgagatttgcgtggctcattcagatgaacttcgaacgctcagtaatgagcgtggtgcacagcagcacgtattgaaaaagcttctggctataacagaactgcttcaacaaaaacaaaaccagtatacaaaaaccaatgatgtcaggtagcagccttcgccccagtgttctgcatggattcagcatgtccaacatggtaattcacttcagtttaatgtctcctttgctcttgccaaaaaatagcacacttttccacattccagtgatgtgtgagctatgcaaacaaaatccaagattctgctggtgaataactatgccagcaaccttgtaagctatctgtgcaggatatttgcactatttccacatggaatcaatctttaacaacctctgagccttggtgtacagaccacctttcacaaaacgaaatgctatgactgtatcttgatatctcgaactttcaaaatatattttcagtacacccagttgccaaagttttgctgtctcttagagaaagaactatgaaatcaactgacaagaaacacattcttattgacaattgtgtataactggattgcagactgttcttactgtaactacttcctgattaggaatatgaccatttgactgttcaatgattatttgtatttacagtttccagagtttgtcattataataggaacaatctttgctgtatacttttaaaaaatactctgctatttctcttgctggaactgttgaaagaaaatatatagaatgatctattgctcatcagctttattttttaaacatacgacttattttgttgaaattgtcaaagactgtatttagatctcataatgctttgttaaatgtttacaagtaaatagtttgaattcagtaaatattattggttgttgtattgatcaatgcatgttacccattcaaccattttatagactaccaatttcttttatgttaactagaatgcttttgttaaaagttatttgttcattatttgtgctacccctttgattatgcagacaacctcatcagctgcctaacttatccatctttgaacttctgactacttgttgtatctgctggatatttagttcaactgtatagttttatttacttctgtatgtgtatttttgtgaagtattcacaaaggttaagttaaaataaaaccaagggatatcttgcaaaaaaaaaaaaa

SEQ ID NO: 548 - DNA, 155 bp, Homo Sapiens
tgaggtgggttgaccctttgatttccgtttcttctcaccttgtgagtagaagtcacagacgggcacacacgcacaccacggtcaggagtcccgagacagcacgaggtggaggcctggtctcaccgcctctcacgctatgtccatcacctggcagg

SEQ ID NO: 549 - DNA, 177 bp, Homo Sapiens
gagctcgcacccggcgtttgcgggcacttacgtcctgcttggtttctgtcctagcactgctccacctgatcatcccagatgccagcttccagtctctattccaagtaaaagccccgtatagctgcctttaggttcggagccaaactccctagcaaagctacctcgctacactactcc

SEQ ID NO: 550 - DNA, 549 bp, Homo Sapiens
  misc_feature (206)..(206): n is a, c, g, or t
tctgaggattaccaggcaaagctcctactcacaatacatataaaataccaagaagatcccatttattcacatattctctaattagtatttgtgcatttcaacttgatctgaccttcagtagtaccttaaaatgcaaatgcaattagtaaaaacggggcagcctgtcgtttcacacttagaaatacaatgtagtttcattacagttngcatttttttgttactcttgaaagagtaaccccttataaaatcagatacataaaaactgcattattccttactttgcaggcatccaggaatggttaaagcaaaggaactctcattcattaattcattcattctgttcccccaatttagatacatttctagtctccagaaacggactccagggcagggaagtggagggcagagaagaggtacaggtcaaggtatgatgaatctctgaaaaagacatccacttttcccagaaggctagcctgaagagaactccgccccatccattccgatccctcaagtaagaatgcataatttagcttgtccttctggtctcac

SEQ ID NO: 551 - DNA, 373 bp, Homo Sapiens
  misc_feature (51)..(51): n is a, c, g, or t
  misc_feature (98)..(98): n is a, c, g, or t
ggcaagttggcctctctgttgtaaattagtggttaaggttatctattattnccacttttccagcgctaaaggctgttttggaaccagtgttgcttgtnccgcgggtgattggctttttttttttggcaaaccagttattcaagtttctggtctttaaaaaactctgtggcggtacggtaaccgaggaggttccagcgcggcggaagtaccccgcgggtgggtgtgtgcgcaaggccagggccagaggggcacgtggcgccgggaggagagagaatgtcttttcgaggcggaggtcgtggaggctttaatcgaggtggtggaggtggcggcttcaaccgaggcggcagcagcaaccacttccgaggtggaggcg

SEQ ID NO: 552 - DNA, 723 bp, Homo Sapiens
  misc_feature (76)..(76): n is a, c, g, or t
aacttacggctaggtacgagccgggtgtgaatcggccgaggcttatggcggcgctggagagggggcgctgagctgntgggtatgaagtgtaacagaacagactttaccacctgaaactgctgcttcaagttcagatcaggcaaggaacaaacctcgtaacaactaacaagaccaaagaagagtacacttaagttgaagacacaacacttgatctgaaacaagaagtttgtgcctactcaacagctttgaaagagcacttcccaacgctgctagtagtctttgttttcttcagtgctgtactgtgagattgcccggtacagcagcagttgtattctttattagcttggtagatcattttctctcgctcttttttttaatactagcaactttcatcctttgaaacgtgtgctgaaaaagaagaatcagcaaatactactgaaagtgcaatatttgagtatcactgcgagatgagctttgatccaaaccttctccacaacaatggacataatgggtaccctaatggtacttcagcagcactgcgtgaaactggggttattgaaaaactgttaacctcttacggatttattcagtgttcagaacgtcaagctagacttttcttccactgttcacagtataatggcaacctgcaagacttaaaagtaggagatgatgttgaattcgaagtatcatcggaccgacggactgggaaaccatgctgtaacg

SEQ ID NO: 553 - DNA, 319 bp, Homo Sapiens
  misc_feature (128)..(128): n is a, c, g, or t
  misc_feature (236)..(236): n is a, c, g, or t
  misc_feature (244)..(244): n is a, c, g, or t
atgctgggaaacgcggcccctctttcctccagtgccaagaagaagggcagagaagcagaggtgttggccaaggacagtgccaagcttgccaaggccttgctgagggagcggaaacaggcgcaccgctngccagcaggttcaccagccagacgcaagccacgctccaacaggcgtcccagcaggtgctggcgtcttgaagcacgcagacaggagctgggagggaagctgagcaggtngggtgctngggttgagcgagatgggagcagcagatcccgggattcgcttttctcacttggagaagggacatcgagactttttc

SEQ ID NO: 554 - DNA, 4246 bp, Homo Sapiens
tttaaactgtgctttctaagcacagtcaggtagcaaaagtaataaaaaggatggttgaacaagttttcttgtatgttccaggatatgtttgggacttttctttgtttattatatgagttgttccctttgaaattaaagctattttgtaggttttgtgggacataatttgataagtagagttaattaaatttcttctggaagagatctaaattcttattcttagtgagagactgtagttaaaaggaaggcttttagaacttgggttcaaggaagatggagatgcgtcggaagctctttggcgggggtgaggaagttcagaaagtgtgcattttccttctggcatttaggtcttgtccgtgtgatttggtggtgcttgggtcataagcctgattaaaattcagggacatgtaccacggcggccaaagcggaattaatttttttatatggggactggagcgctgaaaagttgttcctgaccaggctctaatgagaaattcctctctccccaggttatgaagacagtatggagtttccagaccatagtagacatttgctacagtgtctgagcgagcagagacaccagggttttctttgtgactgcactgttctggtgggagatgcccagttccgagcgcaccgagctgtactggcttcatgcagcatgtatttccacctcttttacaaggaccagctggacaaaagagacattgttcatctgaacagcgacattgttacagcccccgctttcgctctcctgcttgaattcatgtatgaagggaaactccagttcaaagacttgcccattgaagacgtgctagcagctgccagttatctccacatgtatgacattgtcaaagtctgcaaaaagaagctgaaagagaaagccaccacggaggcagacagcaccaaaaaggaagaagatgcttcaagttgttcggacaaagtcgagagtctctccgatggcagcagccacatagcaggcgatttgcccagtgatgaagatgaaggagaagatgaaaaattgaacatcctgcccagcaaaagggacttggcggccgagcctgggaacatgtggatgcgattgccctcagactcagcaggcatcccccaggctggcggagaggcagagccacacgccacagcagctggaaaaacagtagccagcccctgcagctcaacagagtctttgtcccagaggtctgtcacctccgtgagggattcggcagatgttgactgtgtgctggacctgtctgtcaagtccagcctttcaggagttgaaaatctgaacagctcttatttctcttcacaggacgtgctgagaagcaacctggtgcaggtgaaggtggagaaagaggcttcctgtgatgagagtgatgttggcactaatgactatgacatggaacatagcactgtgaaagaaagtgtgagcactaataacagggtacagtatgagccggcccatctggctcccctgagggaggactcggtcttgagggagctggaccgggaggacaaagccagtgatgatgagatgatgaccccagagagcgagcgtgtccaggtggagggaggcatggagagcagtctgctcccctacgtctccaacatcctgagccccgcgggccagatcttcatgtgccccctgtgcaacaaggtcttccccagcccccacatcctgcagatccacctgagcacgcacttccgcgagcaggacggcatccgcagcaagcccgccgccgatgtcaacgtgcccacgtgctcgctgtgtgggaagactttctcttgcatgtacaccctcaagcgccacgagaggactcactcgggggagaagccctacacatgcacccagtgcggcaagagcttccagtactcgcacaacctgagccgccatgccgtggtgcacacccgcgagaagccgcacgcctgcaagtggtgcgagcgcaggttcacgcagtccggggacctgtacagacacattcgcaagttccactgtgagttggtgaactccttgtcggtcaaaagcgaagcactgagcttgcctactgtcagagactggaccttagaagatagctctcaagaactttggaaataattttatatatatataaataatatatatatatatacatatatataaatagatctctatatagttgtggtacggtctaaaagcagtcttgtttcctggaaataaaaagttgggatattaacttgtttttgcactttagaatagcatgagaatctcactaatttagcattctgataaaagaaactttagagcaagtcagaatagagaggtgtttttcctttgaggggataggggaagtaagccaataagaaccttttaaacaaatcgtcctgtcacaaaatgctttcatatggcttaattttgtcaacactgcattgtcttttgagctcttttttcccccccaacaaagtttttttgttttttgtttttttttttaagtagaaattccctccagttttattagcctctttatatgtctcaaattgcatgaattttttctggctgttggaaacctgaatgcttttagacccaaatggaaaatttctgaaatgctggattatctatttttaaacaagcagttgacttaaaactttctgtggcaacttctggttttctgacagttcccagtgagagaaatgctgaaagtacactgggatcactgggacactgtcttatgaaggtttgcttgggatgaaaaaggatattgcagcttcagcagtgttgaactgtgtgtttaaaaatgtgaattactgttattgtatactgtaattgattacatgggctgggggggtgtcaaagaacttgacaggttgtgttgatgctcttagttgagtcttgaaaagtaaatattaacgctacagaaatgcatgagttttcaatatattttttgtctttgtttgcattgtataactttaacgagtgagtttaaaattatttaatttccttagaaaaatagcaccatttggaaaaaaaaactggtgttatgaagaacgtaaatgcactgtttttatttttattttatataatttaaattgactttcccactgtctttaagttgaaactgttaagctgaataaaaacttaagctgcaaattgataacttcgctacataacaaggaaaatataaatgtttacaaacagcttaaagatttgcatgtgcagtgtgcatttataacaaacttctaattgcacaaaacccatgccagctcagagtttaggtgtacacatttacccagttgagcgttcttagaataactactgcacaagttgacaataggtcgttctctctttttttttgtttgctccctttttctttttctccccttcctccttaccctccctcccttactctccccccccaccaccaccctccacccccaactcatgaaaagattctatggactgaaaaagccccaggctgaaaggactggactgccttgattgacatggggaagggggttagtagactatgtggattgcggcagcagaggctgcagcctaacgtgtggttttaatgaccagcacgcaaggcaaaagcattttgcacagtgtttgttttcctgtcttgcacttacaaataaggtctatgggagtagcatggaaaacgtttgctgtttttcccttttttttttaattgcttttgtttaaaatttgatcgccttaactactgtaaacatagcctatttttgtgcttaagatactgaatggaaaactccattgtgtgttgctggactgttttggaaatatttggttaaatgtgtgttaatttggctgtaatggcatttaaagcaaacaaacaaacaaaaaaagctgtgaaaatggccttggagcattatctttagttacttgaagagtttctagtttttttaaaatacagtttatgttaaaataatttttattaatttagagaagacaatcaatgtctgtgagaaaacggactttcttttggattttctttttgtggtcattgtgagtgattgctttttccttttcttagtttcacattcttcctttgttctaaaacttagactgacatctagctttgacaatcatagtatgttttattttcctgagggggaataacttataatgctgtttagttttgtactattggtgtgttggtgaatttttaaactgtgtgctaactgcaataaattatatgaactgagaaaaaaaaaaaaaaaaaaaaaaaaaaaaaaaaaaaaaaaaaaaaaaaaa

SEQ ID NO: 555 - DNA, 406 bp, Homo Sapiens
ttagcgcggaccggcttctgtacttgggctattagagatcctgtagagaacatcaaggaaattgcagccactttatccagatcttgattaaatcttgcaagtagactcacttggtgatatttctgaaatgtggtgggttcatgattgattttggattctgtggtgtttccagctttgtctctcaatttgatggtaatgtcccctcttcttacattcttgttccatgttataatatccacaaagtaatgatacatgcagaatgggctctcctcggctgtgtcaaagaatgccttcgtcattggaggatctttcccccttagatggtctttccaattatcagcataatagcccagaaggggacaggatgtatacggggggagggcgaaccaaggacaaaggctttcgc

SEQ ID NO: 556 - DNA, 566 bp, Homo Sapiens
agtgccaaatctgaaacctagattcctctgtgtctcccctttctttagccctaaagtctcttctactaagtcttctccaaactcaccaaattcctcacaaatccatcccaccccttcaactgccttagttgatccctcttatcaacacaaggttggctctatctcatttcccagatccagcatttcattctccaaagccatccttttcactggggccaaagttatcttccctataacccagacctgactgcgcactcccctagtctgcattctttagcagctcactgaagaattcacctgtaagagttcaaattcctactctaacctcagcctaccttccagctttatcctgtggcgctccatggctttgctaatttttcacctcagccacattagatttttcctaccccacaatttcacacagctgcttccaccctctatgtctttgttcacactactttctcagcctggtatgaactgctcttttctgcctatcaaattcatccttcaagatgaggctcaaatgtctttttttttcctgggacaagtttcctaaactctctaag

SEQ ID NO: 557 - DNA, 407 bp, Homo Sapiens
  misc_feature (316)..(316): n is a, c, g, or t
  misc_feature (341)..(341): n is a, c, g, or t
  misc_feature (397)..(397): n is a, c, g, or t
tgctattactgttcagtggcatcaaatgcatcataattataggtggaaaggctagtaatgatgccagcaacttgtttaaatgaagtttttataatttttaaagctcaaacataagtacatttcaaagttttataaggtttgggagaaactctatcaagctaataattcagtgtttgtaaattagaaatatattctatgaaaatagttatatcatgtaatatacatacaaaatgaaaaatcaatctgcatatggaaatttgggataaggactaattcagataatagtcaaaaactataaccaatttaggaccggggnctgggggctagttttctttttcccnttttttgtttttttttgaggacagtcttgtgctgtcaccccgggggtgggcctgcngtgggcctgg

SEQ ID NO: 558 - DNA, 389 bp, Homo Sapiens
  misc_feature (185)..(185): n is a, c, g, or t
  misc_feature (223)..(223): n is a, c, g, or t
  misc_feature (276)..(276): n is a, c, g, or t
  misc_feature (292)..(292): n is a, c, g, or t
  misc_feature (330)..(330): n is a, c, g, or t
  misc_feature (342)..(342): n is a, c, g, or t
  misc_feature (362)..(362): n is a, c, g, or t
ttaaagcattctctcctcagccaccaaagtttttcaagcccctaatgcctgtaaaagaggagcataagaaaaggatagccctggaagcaaggcctcttctaagccaggaggactctgaggaggaagaaaatgagctggaagtatttaacaggaagctaataagttcacagccttatgtacctgtnggagtttgcttgacttcagtgtttacaatgccagcttnggagaacagggaatggttttcctctaaagtagatctgttcaaactcacgggtntttggagaaagaagtntcccgttaggcccttaccaccagcagtatttaccagtnggctactttttncccacagtgccttccaatgnccaccctgtcttgacatgggtgggtcc

SEQ ID NO: 559 - DNA, 131 bp, Homo Sapiens
cactgtctttttcatagatcgagacatgtaagcagcatcatggaggtaagtttttgaccttgagaaaatgtttttgtttcactgtcctgaggactatttatagacagctctaacatgataaccctcactat

SEQ ID NO: 560 - DNA, 425 bp, Homo Sapiens
  misc_feature (83)..(83): n is a, c, g, or t
  misc_feature (422)..(422): n is a, c, g, or t
acatacgaggggacagggctgaggatgaggagaaccctggggacccagaagaccgtgccttgcctggaagtcctgcctgtagnctgaaggacttgccctaacagagcctcaacaactacctggtgattcctacttcagccccttggtgtgagcagcttctcaacatgaactacagcctccacttggccttcgtgtgtctgagtctcttcactgagaggatgtgcatccaggggagtcagttcaacgtcgaggtcggcagaagtgacaagctttccctgcctggctttgagaacctcacagcaggatataacaaatttctcaggcccaattttggtggagaacccgtacagatagcgctgactctggacattgcaagtatctctagcatttcagagagtaacatggactacacagccaccatntac

SEQ ID NO: 561 - DNA, 1171 bp, Homo Sapiens
ggggggcagcaggtggtggggccatggctgcccttctccgagctgtgcgtaggtttcggggaaaagctgtgtgggaagggcctctccatgggctgtggtgctgcagtgggcaggaggatcctaagaggtgggtgggcagcagttcacccatctcgaaggagaaactaccaaacgcagagactgagaaattctggatgttttaccgttttgatgccatcagaaccttcgggttcctgtcacgactgaagttggcacagactgccctgacagtggtagctttgccaccaggctattacttgtactcccagggcctcctcactctcaacaccgtgtgcctcatgagtgggatatcgggctttgccctgaccatgctgtgctggatgagctatttcttacggagactggttggtatcctgtatctgaatgagtctggcaccatgctgcgggtggcccatctgaacttctggggctggcggcaggacacatactgtcccatggcagatgtgattcccctgacagaaaccaaggaccggcctcaggagatgtttgtgcgtatccagcggtacagtgggaaacagaccttctacgtcaccctgcgctatggacgcatcctggacagagagcgtttcacacaggtgtttggggtacatcagatgctcaagtgaacaactgggacctggacctctgggtaaccctgggtcgcctggattaacaggaaggctgagggtgtgggcaaggctgaagaaaggggactgggtacttggagactttgcctgggcccctgggaacatgtgttttgtggtgaataaattcacaaggcaagagctggtgtacaggtttaggaaaaaggctctaagcaagttcttacagcacttgtttgtgacattcagtcagataatggccagaagtttttgttaagagccagttcttagaagaacctatgccaaggtcacccatagagtccattggtgtgaaagagaaaggcaaagaggtgtggcgggggagcataagatttggagtcagaagtctcagttctgtcatttgtcctggagcaggttattgagtctctttgaatcttggttttcacatctgtaaaatggaaagtcctgcttgtttcatgggatgggtgtgggaataaacaataaatgtcaaaaaaaaaaaaaaaaaaaac

SEQ ID NO: 562 - DNA, 553 bp, Homo Sapiens
aaaatttgagtccttcgccaatccggttactgttgggtaggccttcagcatacttttgtccaatcagcttcagactctcactataaataagcggctagctttctctttctcctgaagtgaatctagctctgaaggcatggcgcgtacgaagcagactgctcgcaagtccaccggcggcaaggctccgcgcaagcagctggccaccaaggcggctcggaagagcgctccggccaccggcggtgtcaagaagccccatcgctatcggcctggtacagtggctctccgcgagattcgccgctaccagaagtccaccgagctgctgatcagaaagctgccttttcagcgtctggtgcgtgagatcgcgcaggacttcaagaccgacttgcgcttccagagctccgcggtgatggcgctgcaagaggcatgcgaggcctacctggtggggctctttgaggacaccaacctgtgcgccatccacgccaagcgggtgactatcatgcccaaggacatccagctcgcacgtcgtatccgcggcgagagggcttgagtctca

SEQ ID NO: 563 - DNA, 536 bp, Homo Sapiens
tttttctggaattcttttttttttttttttttttgaggattttgtgtggctaatgtgttctagaagcagagactccagggagaaccagaatttatgaagcctcgtgcaacatggtgctttctcaccgaggtcatatgcctggctgctgctgttccactcagctccatgagccacgtttgttattttatgtttcttctgtgcttttgctcatttccacccatgtgtttatagaccttttttcagccctttttctttgttcctttccctcatctttttgcctcaggtagaatccatcagttttcctccccctccaaatgactgtgtacctccagctgctcaggactttggaggtgggggcggggcctggggatctacccttctaaaaaactctccaagtaattctgataccaataaagtgggagacctccatttttgaggcctatttgcaagcatgtctccctccctttccatggctttttcgtttctcgcatgttccactgctttgcactgtctagacaggaaacctaggaagatgt

SEQ ID NO: 564 - DNA, 372 bp, Homo Sapiens
cgcgctgggtggttcagaagcgaattctgcaccgcgaagcctgagaggcaggtagctgcggcgctgggctggcggcggcgagtccacgtgctccccgcggccggttgaaaccgttggcgggcgctggctgagaggcaatgtttgctgtcttccattggagtgactgaatttctacatgacggctttttgacaagacttaaaacctgtcttggatagagaatatttagccatttacctaaaaatggtattttttacatgcaatgcatgtggtgaatcagtgaagaaaatacaagtggaaaagcatgtgtctgtttgcagaaactgtgaatgcctttcttgcattgactgcggtaaagatttctggggcgatga

SEQ ID NO: 565 - DNA, 1342 bp, Homo Sapiens
gaattcgggcggccgcggcccgggtccctcgcaaagccgctgccatcccggagggcccagccagcgggctcccggaggctggccgggcaggcgtggtgcgcggtaggagctgggcgcgcacggctaccgcgcgtggaggagacactgccctgccgcgatgggggcccggggcgctccttcacgccgtaggcaagcggggcggcggctgcggtacctgcccaccgggagctttcccttccttctcctgctgctgctgctctgcatccagctcgggggaggacagaagaaaaaggagaatcttttagctgaaaaagtagagcagctgatggaatggagttccagacgctcaatcttccgaatgaatggtgataaattccgaaaatttataaaggcaccacctcgaaactattccatgattgttatgttcactgctcttcagcctcagcggcagtgttctgtgtgcaggcaagctaatgaagaatatcaaatactggcgaactcctggcgctattcatctgctttttgtaacaagctcttcttcagtatggtggactatgatgaggggacagacgtttttcagcagctcaacatgaactctgctcctacattcatgcattttcctccaaaaggcagacctaagagagctgatacttttgacctccaaagaattggatttgcagctgagcaactagcaaagtggattgctgacagaacggatgttcatattcgggttttcagaccacccaactactctggtaccattgctttggccctgttagtgtcgcttgttggaggtttgctttatttgagaaggaacaacttggagttcatctataacaagactggttgggccatggtgtctctgtgtatagtctttgctatgacttctggccagatgtggaaccatatccgtggacctccatatgctcataagaacccacacaatggacaagtgagctacattcatgggagcagccaggctcagtttgtggcagaatcacacattattctggtactgaatgccgctatcaccatggggatggttcttctaaatgaagcagcaacttcgaaaggcgatgttggaaaaagacggataatttgcctagtgggattgggcctggtggtcttcttcttcagttttctactttcaatatttcgttccaagtaccacggctatccttatagtgatctggactttgagtgagaagatgtgatttggaccatggcacttaaaaactctataacctcagccttttaattaaatgaagccaagtgggatttgcataaagtgaatgtttaccatgaagataaactgttcctgactttatactattttgaattc

SEQ ID NO: 566 - DNA, 143239 bp, Homo Sapiens
agcttctccgccgggtgcggtgcctcacgcctgtaatcccagcactttgggaggccgaggcgggcggatcatgaggtcaggagatcgagaccatcctggctaacacagtgaaaccccgtctctactaaaaatacaaaaaattagccgggcatggtggcgggcgcctgtagtcccagctactagggaggctgaggcgggagaatggcgtgaacctgggaggcggagcttgcagtgagccgagattgcgttactgcactccagcctgggcgacagagcgagactctgtctttaaaaaaaaaaaaaaaaaaaaaaaaaagccgctccagtctccttagtgggtgggcacgaccccaggatgccccccgggggcaaaacctgtgcggggtgcagcctccacagcccctgcagtaagagatcccgcccctccccctaaggtgcaaaatgctgcagcttccaattccttaactattgagacccccatcccgcaaacgaacaagttccaagacttttgaaatactttagagctggtagagccacgcggctttgcagaaagctccgccattggagatggacaggggcgggggagggaggaggcgccgggaatcagggttttgctggatctttctccaggtggccgcgcccggaggaggaggcggcagcgagatctgcggccagaaacccagtggccagaggactgagtgggcagcgcgggggtcgggaggtgggcatcgtggtgtgggggtgtcctcttagggaacttctgccgcctgccctactcggggagcctagaggtgtctcctccagagccggcccgttctgggaccccagactccaacatggggctgggaagggggcatccgcagtcattctggacggtgcccctcctcatcgaggcctggccccgagagccacgccccagccgctctggagtctgagtttaacgtgaagaagctggactccgagggtgcggcgaggctgcggtggggatggggaagacaggggaaggagaaggggagggaggtgggcagaaaggagggaggaggaggagggaggaggggtaaggaggaagaaggagggggtaggaggttggggaggaaggaggaggggctaggaggctggggaggaaggaagagggggagggcggcccagcaccaggccaccgggaggcggggcggggcctcctacggattcctgggtggagtgtggacaagcggcctttgcatccttcgccgctggttggaaatgcagttttggaccccctcctcccccgccagggctcccacccaaccggaatctgcattttaaccggacacccaggcgattcctgtgcacattaagtgtgagacgacctggtaaacataacgcttatctgcagctcactcttacactggggagtggagaagggaggcagaggaggcagcaggttgctttttgtaacagaagagaggcgagaagaggagcagcttctccctttcccttataagctaagggcagggctggcgcggtggttaacacgtgtaatcccagagcgttgggaggcgaaggagggaaggtcgcttaagcccaggagctccagagcaccctgagcaacatagcagacccggtctctacaaaaaaaataaaaattagccgggtgtagtggcgcctgtagtccctgctacttgggaggccgaggcagaaggattcatagaacccaggaggttgaggctgcagagagttataacagagccattgtactctagcctggataacagagcaagatcctatattattaataataataagtaataagtaataagcaaggggaaggcctggccaagggaaaagctcattcctgtccgtcttctaaacatcccctcactatcctgggtagagtttgataaaggaacttttgtagacccttgagggtcagcacttggcttccatttggaggcctgctgaggtcaggccattgggcacaagatgttccaggaccctcagccgcttgacctgctgaggctgtccaagccccgtgtgggagaagtgtaaactcatgggggcgaggggtggggtaggacagaacccaagtgaaaatgtacattcacgggcagggcaatgttttcctcacccgccgggtgcaaatcctatctggcttcatgttgccgtctgtaaagctccttgccagttactttcgtaagacaggcctcactcatctcctcaagcaactttcacctgtataatattagctctgccttccccccaggttggggtggcgatggttggaaaacaagcaccagatatttctctggaccctgtatctatcccagggagagcgttagcctggccccaggaccaagcagacctggtgctttgaaggcacaagcctaggaaggagaagacaagatgcgaaggagagctcagggcctgagagctcacgaggtggtcagtttttgtcagctttaacatgaacgctttctctggagctgaatgccaggtttggaggcttactgtaggctatatctgccagtaatgccagtaaacgtataacatccttgctgtagacttaaaaattacaacgtccataaatttgcaaagtagagttttatttcttaaaaaaagttgcaacttgcaggctgggaagtggagcctcctgtgcagactaaaagcaggcactctgccagagcaagggtgggacaggagtgttatgctaaatgggttgaatgtaatataatattcatcaggttacaggaggagctatgaatattcatgaatagaggatcgcgaacatatgttgtaagcaaacatgcatgttatgcatgtcccatgttcactgtgaagtggagacatttaaatgcattaaaattaggctctataagtgaaaaggtaaagcaaaggacacagagtgtcttgtgcacagcatctgtaaaccagtccatggaaaggagaattttatctgaaaggaatgcatggtgaaaccagttacctgctgtgtcaaaaccacaagaagggaggggagttgggctgtggtatctatctggcaattggctgacatcaaggatggagcaaagcttccattctttgtttctccaggaccagtttctgtttaattgttaagaaataatctggtaaagattaataagaaagacggcataatgaggcatgaccaacctcccgtctcttcatggctgggaaacttaaaggttttctgggatctccttggccaagagggttccttttaatctgctgaaggtggggggagttggattttatttttattttacaattcattcattcattcattcattcattcatgacatactttctgagtacctattatgggccagataccatctttaggcccttgggatgcagcatttacaatactaattttctgttttcacagtggcagatgattttttaaaaaatatatgctggcaacataatgataccccatctctaaaaaaattcaaaaaatgggccaggtgtaatattgcatgcctgtgtgatcccagctactcaagaggctgagttgggaggatcactggagctggggaggtcgaggctgcagtgagctatgattgcaccactgcactccagtctaggtaacagagtgagaccctgtctcaagtacacacacacacacacaaacacacacacacacacacacacgcatatgctatgttaggtgatatgggctatgggttataatgaaaaatgaagtttggtaaatgggattgagttggcaggaaggttcaattatgccttggttggtcagggaagctttctgtgttgacatttggacagagacctggaacaagggaggaggaaagctgtgcagacaatgggttaagtccagcccggggactctgaagtgggagcatgcttaatgtgccggaataagaatgaagagactggtgtggccagaacaaaatagacatggtgagaagtgaggggagatgaggtcagggaggaaatgagtagatcagatggggccttacaggcttggcgaaggctttggattttactatatgggagattgaacaccatgggaagccctgggagggtttctagccatgctgtggcaagaagtgacttatatttttaaaagatcactctggctgctgtgttgaggataagttgcggaggctggaaggccaattacaaggctactgacttaaatggaagtgagaaataatggtgatttattattgggtgattgtggtgggtaaggcgggttattgtaggactctgcatgtatttgaaggcaaagccactggaatttcctggaagattggaaatgggagaatgagcagagtcaaggatgactacaaagtttttgatctgagagaatgagagaatgatgtttccatgtaacacaatgggaaaacagaggatgtaacaggttgtgggagttgcagagttggggggcggcggacatcaaaggtcagattttgtctatgttacatttgaggcagatgtgtggcaggagatataaatctcaatagtgttttaaagttctctccctcaacactctaagcccttataagaaagttctccatgaatgcatagtgccatagaattagagaattcaaaaattatagaagctacttaagaaatatttttttgttttacatatgaggacattgagaatcagggcaggggggacggtaaagtggtttaccaaatatgatgtaattggtaataacagagttgggattagattccaaaactcagtgcgtttcccctgcactaggcagcactgcctcccaagaaatgatattattattcctgctctttctttggtggccaagatcaagtagactgtgtagtgaaagatagtcttgttcagttacaatgacattggtataacaatgggtggtctgtaccatttaacatggaactttccctccctcccttctgccctccttccctatctctctctctctttcccttccctctatctctttctctctcttttcctttccctccctccctccatttctttctttctttctttttctttctttctttctttctttctttctttctttctttctttctttctttccttctctttctttctttttgtccttccttccttcctttgtcccttcctccttcctttcctctctctctctctttctttccttctttctttttcttcctttctttctatcctatctttctgtgtttctttatttctttcttgaattttaggctttattactgataatttggtagccactccatgaaatagttccatcaagggtcacttattgacttggaagtaaatgtacaaatcagaaaaattctgagtattgttgtattagtccattctcatgctgctaataaagacataccggacacagggtaatttataaaggaaataggtttaattgactcagttcctcagggctggggaggcctcaataaacttgcaatcgtggtgcaaggggaagcaaacatgttcttcttcacatggtggcagcaaggggaagtgctgagaaaaagggggaaaagcccgttttaaaaccatcagatctcgtgagaactcactcactatcatgagaacagcagcatggggataactgcccccatgattcaattacttctcagtgggtcccacccatgacatgtggggattatgggaactacagttcaagatgagatttgggtgggaacacagccaaactgtatcagctgtgagcctcgtctttttttttttttttttttttgctcttcagatcaacaatgaattgttcatgtaaaagaagtgctcaggctgggtacagtggctcacacctgtaatcccagcactttgtgggggctgaagcaggttgaccacttgaggtcaggaatttgagaccagcctaaccaacatagtgaaatcctgtctctactgaaaatgcaaaattagccaggcatggtggtgcacgcctgtaatcccaggtacttgggaggctgaggcaggagggtcgcttagcctgggaggcagaggttgcagtgagccgagattgcaccattgcactccagcctgggcaacaagagtgaaactccatctcaacaacaacaacaacaaaatactcagttcaagaaatcacttgaaattttcttctttttaatggatgcttgctttggaaatagtcaagctgcgtttaactatttgattttcaattcaatcaactggttaaatacattggacttcacacattgggattcattttgtgctgtttcctgtagaagaatcctgacattctaggatggagagtgaggaggatgagttgagtccatgcactgggtgatcttggaaaggatggagctgtcactccagtgacaccaagcttggagctctgcctgttgtaagaattcccttctctcaagacacacatgtggggcatgtcattgaacaaggctaaagcatcatgaaatacagccaaccatttcttccttgagcaatcaaattgctagtcataattcctaaggaataaaagcagatttttcggactaggaataatctgattgtgaagcatcaaaataagataattactttgaaagactcgaaaatcacatgggccagcagcccaatacatcatctccaaggtcacattacactgttaaagcaaacacattcattttacacctatgcagtcaagcttgttttctcctctgtcccaacctactatccatatgggtcccaattccccatctgtcaattccttttgttcttcacagttgagattttaatttcagggataataaaaattatcaccatcatcaggtttgggtttgatggtgtgttttgcttttagaagcactgtcatcctttcccacaatgcagagaattgggaggacatgtattccacacattttacaggtggaataagaagcacagggccgatggcaactggtctctcttgagataccgtctccactttaatgtctcatgggcagtcaacttctcatggcaaagccactgtctgggtttcccttcctcttccttaaccctgtccacttctaaagatgtctcactcattttcacatcagtagatggaaactccatcctttttcttctccagcacacacattctggttcacctttgtttggtttctcttttctcttactctctacacatcaccagtaaatctcatggccctcactttcaaaatgtgctcaaaacgctgcctagtagttctcttaatcgccaattggtcctagacaccaaaatctcttacctagattattgccatagcttcataactaaccctatcatcctcaactcttcctgtcccccagtagacactcaacagagtaactagagtgcttcttcccaaatttatcagtgtcacttttttgctaagaaccctccaaagccttgtatgtactgtggcctacaaggttctccatgactgagcccctcttatcactggcctggcttccctcttgttcatttccttcctacgaacctggcctagatgttattctataacttgccaatagaatttttgccttagggcttttgtacttactctttctgactggaatagattctctcatatatatccatgtatctttcatagacatctgcatatatatggttcataaataatctatatgtttattagagcttaactctcctttatgaaagaccaacccttttctccccgttcaacccttcctaatctttttatctttttttatccaaaacaattatcaccctctgaatcctttatatttttcttttgcttttttcctacgttcttgtacaggaatataaattccgcaaaggcagggacttaatttgttcactgctatattgtcagagccttgagctatgcctctctcatgcaatttttgtgcttattaatacttgttaaatgaataaattgatgaattcagagccatccaaagacagaatggacctccctggatgatagtagacactggggggtttccagtattggtactatgttataaaatgaacctaatgatctgaagggttggactaagctcgatgtcctttaaggacagcagcatagttgggggttgagatcatgtgtcagagataagtgatttgagttttttctttgatactcctgtgacattggataatttatttaactctcctaatctcagtttctttgttggaagggattttatgctttctatttcatagtgtggttatgatgataaaattaaacaacatgatacaaaccagagaacacatgtaagatgtttagcctggttcctgagacttacttaataaataatgtggcaaacattaactatttacttattcctatttcactcctatagctggtatgtctcctgcatactctggatgctcaataaactgttgattatgcattggtagtgtggttttcaagaaagggccaagcacaatcatgtctcttccagcctctggattctgaggatctgggaaaggatgggcccaaggctacccaggatgtgaatggactttttggctctttgttgggttatgtttttcctgccaaataaattgttagttcttttcctttaggcttccttctttaattctggtaagattcctgactctcctgatcctcacttggtctctaaatttgctctttatcttgaatttttttctcaaacctatctgtattaggccattcttgttgtgctataaagaaatacttgaaactggtcaacttataagaaaataagtttatttggctcatggttctgcaggctgtagaggaagcatagtgtcagcactgcttctggtgaggcctaaggaagctttcaatcatggtggaagatgaagggggagcaggtgtttcacatggctgtagtgggagcaaaagacagaaggtggtgtggggggagatgccacatgttttaacaactgtatctcatgagaactcactcgctatcatgagaacagcaccaagccatgagagatcctgcccccatgactcaaacacctcccaccaggcctcacctctgacattgggaattgcatttcaacatgagatttggggggatgaatatcccaactatatcattatcttgcttacatcttgacctttgcctctgatatttattttgtctaatgcaaatttgtgaacccctaaaaaattccaccacagattgctcatgctgactcagatttaattgggatgagtcaaataccagctccctcattcctatagctggtatttctcctgcagaaactggatgctcaataaatatctgttaattatgcactggtagcatggtcttcaaatgagttactaaatgaaattatcagaaatgatcacagccatatcaaatttgggcatatggaaatatcagaaagacatatgctgaaatataacagttatctaaggtggcaggaatatgggcaaacacaaagctattattctacagcaaatatttgttacacttagaaattaaaaagtaaaatatattttcttaaaaaaaatgccccagtaatgcatatggtaggtcctactggtgactttcttctgatagaagttaatcacttctctcagcttctgcgtctgcagattgaaaacagagagcacaatatctgtctgacatactctaagatttgaacaggatgatgtatgtatcagtctgttttcatgcggctgataaagacatacctgagactaggcaatttacaaaagaaagaggtttaatggacttacagttccacatggctggggaggcctcacaatcatggcagaaagcaaggaggagcaagtcacatcttacatggatggcagcaggcaaagagagagcttgtgcagggaaactcccatttttaaaaccatcagatcttgtgagattcattcactatcatgagaacagtgcaggaaagatccacccccatatttcaattgcctcccactgggatccccccacaacatgtgggaattgtggcagttacaattcaagatgagatttgggtgggtacacagccaaaccatatcaatgtatctgaagctactttctaaactggagaaaaatatatgagttttaggtgttttagttattggcattgctgtggagatggatgttatattgccatacggatatacaactgccatactttctgatcttctgtcttttttttggacacagtcagctctcattgggcaaacatgtttgatgtgctcatgttcaactcttcaggagagaggcctggaataaaaagctattactaattccgacaagattctgtctttcctggcacatttgtcctgaaacaattccttattgagactttccttgagtggctaaaaactggattttgaatcagtttcctgaggacttcctgtttgtggtcactcagctgtgtcctaattgattactcactgcatttgcatctgatgcccatcactgttcttgttctacaagctggatagatgctcttgccttgattaaagcagagaatagccctagcctcctcctggagatcgctacttttggcctctttttgtctgcaatgtgcaatttttctagaaactgagaagcagagtgcttgagatccattcacatttgccatcttccccacactgtctcttcctcgtagggaaggatatggccttggtagaatagtatgaccttccttttggcagagcagttcatgtggagggatcataagctgagggtcttctagtgtccattatttgtctttcgttattaagggacatctgctaagaccttcagtcctgagcaaggtgagccattccataaagaagatatctacacagagtgcctatgcattccctgggtctaaggatgcagctggggaaaatgtctaaatggattaaaaatccattaattatcaatccattgattaaccatcttgattatcatacacaggcacacaggtacagaatcttggaacttttgcacaagaagggacttgtgggtgagaggaaaaaatgagcctctgatggaaggaggtaacgagggaaaaagaagtagagagcagaaaggaagcatgagtggacactcagaagttgttttaaccttcccagaagcttccctttataaacagctagacagcttggttcaaaccaatatttggatttttcctgaaactagctaaaataaaagttccctaactaataataagcagcatttatttagtgcctaccatctactagagaactgacactgccctaagagcttccaaataattttattcctaatgctgataaaagaaaaactttacctcaattaaacttaaaggagtttattgagcaatgaacgattcatgaattgggcagcctcttaagccaaagtaggctcagagactccagtgcacccaggtggtagaagaagatttatggacagaaaaaggaaagtgatgtacagaaaatggaagtgaggtgcagaaacagccggactggttacagctcaacatttgccttatttgaatatggtttgaacagtgggttacatttcattggcccaacttggtgattggcaaaagtgtaggctacagtctgcttatacctccacttgttatagttcatgatgtacagaactctaacaagtgcaggtataaacagactgtagacctttaggcctgtgaacactgaatatctgaaacaggtctcggttaatttagaaagttcattttgccaaggttgaggatgcatacctgtgacacagcctcaagaggtcctgacaacatgttcctaaggtggtcagagcacaggttggttttatacagtttagggagacatcagacatcaatcaacatatgtaagaggaacactggtttggtctggaaaggcagaacaactcaaagcagggagggggcttacaggtcacaggtagaaaagagacaaatggttgcattcttttgagtttctttttcttcttcttcttttttttttctttgagatggagtctcactctgttgcccagactggagtgcagtggtgtgatcttgcctcactgcaacctctgcctcccaggttcaagtgattctcatgcctcagcctcccaagtagttgggattacaggcacgtgccaccacatctggctaattttggtatttttagtagagatggggtttcaccacactggccaggcttgtctcagactcctgacctcaagtgatccaccagcctcggcctcccaaagtgctgggattacagatgtgagccaccatgcccagcctcttttgagtttctgattagcctctccaaaggaggcaatcaaatatgcttttatctcagtgagcagaatagaatgggaggcagatttgccctaagcagtccccagcttgccttttccctttagcttagtgatttttggggctccaagatttattttcttgtcacaggccaaacttaaaatattccaagaggcagctttaggctaaacttgatttaacagtgatcaaattatcttttattggccccatgtttcagatgagaaaagggatgtgaagaaaagtaggatgagtcgcctaaagtcacatggtgagtgtgccagtcatctttcaatgcttgttctcagctcaatttctcacactgaccctgctctactctttatcacaggagttgcatagttcaggctcccttcttgattagattgcatatgctactgggtcatgggaggaaccagagaaagggtagaaaagggaggagggacaaatcagagaatacctgccaccatcacctccccacctttctttcaggccccacgtccagcagaggtagtgtctccttttcctgcttgagttcttgagtatgacttcccttggacacctctcccctccatggtctcagttctcaccaggctgcccctgctgccataattctagctccctctggatgatcctgggttctggtctctggtagcaacatctacttcttgtgtgctgcaaccccagaggtgataatggcttttttccattgctaatttctgagttgccccattatcccctgtgatgaactgaactgttccctctcccccaccccaaattcatatgttgaagccctaagctcccaatgttactgtatttcgatatagggcctttaaggaagtaaataaggctaaatgagctttaagggtaggaccctgatctgattggattagtgtctttataaaaagagacactggagagctcactcttgctctgtcatgtgaggacatgatgagaaggtggccctctgcaagccagggagagagccctcaccagaaactgactgtgctatcacccagagctttctgtcatttaagtcaccaagtctatattttgttatggcagcccacactgactagagttgaatttgcttcttacctttcccttaacttgtggtatatttccttgtattacattccattctctctggagctcttagaatgttctttcacctcctcctcctcctcctctttgtcctcctcctcttcctcctcctcctcctcttcctccttctcctccccttgactggcccctaacatgctaagtccactaggaagtttaaaactggaagttgaaccaagatctaattggacatcaaaatctgtgttcttaaaagctacactgtactttctagattgttttggttgtctgaagagatttgaggaacagccaagtaaataatatgaaagaggctctgtttgattaatgacactaagagggatggaaatggaaaaaagtttcaagttttcagtggttctaaatgtgacattttagacccatcctttgtaatgacaggctggaggttgggggtctctgtggagagacagcattccagttagtggccctgctgtcatggacagcaagaggggtagggatattgtactgatggaatgtggacattggtgttccttgacagtatcttgaatggtatcatgatatggcatgccaagccctgaaatatatattagcttggcagtgaatatttatgtttttcttttctgataacacatggagttataggctgttaatgtgggcaaggtacatgtctttaatgttgttaactattctcattctttgacaaatctttcatttctcccaagcaatatcttgttcacatctgttgccagaaaaagggattccaatccagaccccaagagagagttcttggctctcatgcagaaaggaattaagggcaagtccttgagtacagtgagaagacagagtttattgaagctgctcagtaacagagtaggccatcctcagaaagcaagaggaggaatatgccatctttgttttaaactctccttatgtaggggtcttatctatgtaaaagtaagctatgtctatgtttaggtggactgagagcatgacaacatttattactttgttgacttaaagaaagttttacttggcattttagtgagtaagtacatcaaagcatgactatagctatcataaaagcacacactgttatgtgatagtgtatcacataactttatctttaaagttatgggatctttagtgtatcacttttctggccagaaacctctgtggctggaggcacctttgcctgagttcttatcttgtgtacaggaagaatgaggtatgcttacaagtagagggtgagcaagacaaagagaagctttattgagtgttagaacagctcggaggagacacacagggggcagctcctgtctgtaggctggtcatctgattcagtgttcagctctcagcagaggggaggccctggagtgggtggttcctctctgcaggcaggtggtcctgtttggtctgcagctctcagcagagaggaggtcctggggaggttaactcctctttgcagctggttgtcctgtcctttgctctgttctggctgagcctgcggcttttacaggcctcagagaggggaagtgcatgctaattggtccatgggcagccacgagtgggcctaggataaagcaccatgagttccccctcctttctacaggactggcagcccagcctccaggcttcaggcgtgccctagcctgaaggtgaggcttcattggggatctacccacttccacccaggagcctgtctgcctcccacaaccatctattgcaccaagggacacctgcagggcagcacctagctgccctcagctcccctcagcttcccctctcatgctcctcagctgatcagcacccaaagtctggagggggccaagatggcaggaggctggcatgtcaacacttccccaagcatgtgcatacacagccaggttgtgacagcacctgggtttggccccaactctggtccgagattgaagcgcgtgccagggagaggccaggcagcaggaacagtcacttccaagcctgcaagtgcaagagtgcagggaggcctgggtctgcagccttggtttgggtggctgcacctacgcagggtggggggtggggtttctgtgtgctcctggctcccaagagaataggggtgcctgggctgcagctgtgactggggcggctgcagttgcacctggaaagctccccctcaccaggcacgtgacctggcctggccctatctcagcggccccagggcagaagctgctggggggagggtgctgtctgcctcctcctgcgccctccctgtagtggccagtgtgatggcagatggctcactgctgccatcagtattggtacatctggacattctgctgtcacagaagtttgtccttgctgtcatgactaagctgcttccttagccataaacatcttatgaccatgggttgtgactggtgaggaatgtgccttgctagttttaagatggagttgattttcaaatgatggcaccctggctctcatgtgctccttttcccctaacacttctgtccaccaaagttgaggaggaagcatatactttgggtgacttcattcacttttccttccttggccttactttttcatatgtctcgatggtgattttgaaattcatgtgttttcttgagcaaatcctgtaagcaaattcctgacaaagaattggcaaagcagtttgctaattgccaatgagaaagtgttactttagaatcatttatggcatatttaatgggtggctgatgaagaatggagatcggcattagctctgcaaatgtcatggacacacgatttccttctaatggtaatattcattcgaatatgccaagggaatgaactcagtgggtggacatggtcaactgctttcccaggaacatggtgattattaagcttcataatcaacaatgcccagcaaaggaaatttaatctcaaactatgatagtaacagatgacagtgcgtaggatgtgaaagtgccatacaaatttgtccaaatttctaacatgtgacattcaaggcattctttattagaactgtccaaacctgtctaattgctgatgcatagaaataatttctcttgatgcttaatcactttaatccagcctaaatacttccttcgttgctatcgctgaagaacaaagtgtcaatcaaaggcgataggcagatacatgttgctgctccccatgaaactggttatgtgttatgggtgaataactactagaagaaaaacttatttgttagggcattgtctacttaagaatctgagaatctgagaaatggaaaaatagagacatgaaatagctcatgcgccaatcagaattttaatttattttattttgtaaagaagataccacaaaatagtgttatatatccaggcacagattagtgaaacctagactgtaacctagggtaactcattgttgagtttaaaattcctgccatctatatagcaatgagttttaaagtaacacttccccagatcagttaattttgacataaatgaaaaactggagaatggggactacttgagactggctcggctcaacaggtagaaggttcattccaagggtgaacaagtgtagttacatatgtttgctgttttgtctattaaagtataaagtagaaaagtcatgggtttgatataaaaaaagcctgggtttattatgcccaaacttctgcaaaaaaatggtgttaaaaataatacctgcatgtatgtttgttatgagaaatcatggattaattacaggtgatgtgcttagaagagtacctggtaggtagtaaactcaacaatggtcactactgctatgagctgcttggatttggacatggccatctgttttagtccatttgcgttactctaaaggaatatccgaggctgggtaatttatgaagaaaaatggtttaattggctaacagttctgcaggctgtataagcagcatttgtgctggcatctgcttctgctgaggtttcaggaagcttacaatcatggcagaaggcaacggggagccaatatattacgtgagagttctcgagcaagagagtgaggtgggagatgccacacatttttaaacaaccagatctcatgagaactcactcactgtggcaaggacagcaccaagttattcatgaaggttccgcccccatgacccaaacacctcctatcatgagatttggaagggacaaatatccacactatgctaccttcatctctctgaaagtccattctggggaaaagggaagtaggatttatatgactccctggaatttgcatcagtgggtgaacgttacaggggatcagagattagaacaatgtaaagaagttggactgcaaacagtccaagttatctgttgggatggcttgcagcaaagtaacttccctgtcactgtagatattcaattataggttaggcagctgctttttaggcataagaaatgtgggttaaatattatcagctaattcaacctttagggttttatgattctgagtagcatatatatagtaagtaaagtttagtgcgaaggtatctactcttctacttcttgaagctttgctacaggtttaatttttgtgtgtatctcttattgacatggtaattaatatacatggctattttagttattacttgtatttatttgtttatttttatttatttatttattttgagatggagtctcactctgttgcccaggctggagtgcagtggtgcgatctcagctcactgcaagctctgcctcccaggttcatgccattctcctgcctcagcctcccaagtagctgggactacaggtgcccaccaccatgcctggctacttttttgtattttttagtagaatcggggtttcaccgtgttagccaggatggtctcgatctcctgacctcatgatccgcctgcctcggcttcccaaagtgctgggattacaggtgtgagccaccacgcctggccagttattacttttaaaacgaatattaatgacggcaatgaaaatttaccactaattaagtgcctactatttgtcagacattgttattctgtgtcttatatttgtaattttatttggggccactgagaagtccagttcagaagtaactaggcagccatagttagaaagaaatctggggaagagggaggtcagttttctatttctcttgctgatattcatacattatatacttacatagataaaagtaaattttttttttttttttgagacagggtcttgctctgtcacccaggctggagcacagtggcacaatcatgcttcactgcagcctcgacctcccaggctcaagcagttctcccacctcagtctcctgagtagctggaatacaggtacacggcaccatgtctggctaatttatttttctttttattttttgtaaagagcaggtctcccagtgttgtccaggctggtctccaactgctgggctcatgcgatctcctcccacctcacactcccaatgtgctgagccactgtttcccgcccaaaagttaataacttttaactttttgttcttccaaatgttagcacacagtattttaagtgcaaattctccttaagctgaattactgtttttggataagagtaagtttttgacatatgaatcgaggaagatataaacgcatcatcacagaattcaacatacacttgaattttccaagttaaaatgggaggtgtggaggtgttgtcacttgtatagagggcccaaccttctagatcccagggcaaagaaggctctttgtgctatactccgtggtttcaactaatctgtgattttccagaagagatgatgagcaattacaattaagcatattccaaagcactaatgcaaaccagtaattttaccctcctcaccgaaatttatttgaaatttgagaaccaataggaaaaggagcccttttcagtccttatctctttttgttgtcagggtttactctcttaggaatgtgagaacaccaaaagtagaacctatgatacttgaagttggcccctgacttgtgatcttgtgatctcaatgcagaatcaaaaattcccggtgtttgccttctggacacaatgttgtcactcgaattctggggcccttgattttctgttctcctcccactacccacctcacccacccacatacaaaacaagactatagcatgggcctatgtaagtggtccttcctacttagccctttagaatgattatgcttttcataagcttaaaaaaaagcctttttatgtagtcggctgttaattttttttcaactctgttctcttctaagataagaacgctaattagagttagggaatgatttaaggagcattacctaaaatgaataccttattgaagatatgatgtggtaacttttcaaaatacctcaaataagtcaaagagaatcctgaaagccctgcattatggtgttgaacacagttagcatggatctgggaatttcatgtcttcagaggcctagcacaaaaatatttctctctcttactcttaatatggttttaaataatttccatcaataaacttttttttttttttgacgcggagtcttactctgtcgcccaggctggagtggagtggcacgatctcagctcactgcaacctctgcctcccaggttcaagcaattctccagccgcagcctcccacgtagctggaattacaggtgcctgcctctatgccgggctaatttttgtatttttagtagagacggggtttcaccataatggccaggctggtctcaaactcctgacttcaggtgatccgcccacctcagcctcccaaagtgctgggattacaagtgtgagccaccacgcctggtcaagaaacttttaagccccatgattatgtagatggattcttgggtgtctaagcagcctatatagattaatgcaatgaaaaatgcagcgattttccacccaaattctctatatgggtaatgaaattatgtgtacactgatgaagaaatatatgtgcacatgagtatatttatattcatattgtgtacttattttggtaaactcatcattgcaatctgtattgaaattatatataagaaaattaaggtaccagttaatttctactctttaaattaaaaattctgtacctatagctgtgatccaatttaaaattcattatctttaacaaatggttttgattggctaccaaatgcctgttacagtgtggaacattttcataggtaacaccccatcacctcggcagccctgttttacagatagggaggtgaaggcttagagggtaaatataatggacccaagacacacaattttgctgtctacagcccgggacttgaactctcgtctgttatttttgccaagctctaagggttgaggagccctaaaaatagacaaattttaggcagatctaatagaataattcacttaaaaatagctcctggttccctttgggcaaattatataaaacactaggaaaaaaataacttgttctaaactggaacaaccaacctatttgttgtggaaatgaatatcctaatgttttaatactgtttctgtctgcactgactggcaatagaaggaaatgcactagaaataactctgtctattgaacatgaaagttactatgagaaaattgtttggcacttgcaagctgttgagatagaaagaatcaccacttattttgcatttgagtatttattcttttcctcaagatgcaaacacagtgccatagagaagtgatattgtatctttttttaaatgtaaagagatatgcaagtatattaaatgaatgatttatagtattcctctgttttcttttttttcaattttaaaagaaagaaatgaccctagcttaacatccttataaatggaggtggccacagtggatagatttgaggattactacaggactgaggttaagagtgtatgctttgggctgggcatggtggttcacatctataatcccagcactttgggaggctgaaatgggcagattgcctgagtccaggggtttgagaccagcctgggcaacatcacgaaacttatctctacaaaaaaaccccacaaaaatagttagctgggcagggtggcatgtgcctgtagtctcagctactcaggaggctgaggtgggaggatcacctgagcccagatgctccaggctgcagtgaaccatgatcatgccactgaactccagtctgggtgacagagtgagagcctgtcaaaaaaaaataaaataaaataaaaaataaaataaataaataaaaaagagtacatactctggacctttcctatgagttaaatcccagttctgtcatctactagtgtgtgacccagaggaagtttttcttaaaaaaaatctgttcttatatgttttaagattgagaataaatgaactttgataatcctcacaatatttaaagtaaaatagtgtctccaagacagtctactggcaaggtagaaattctgtttttcaatggcttgatgtcattgtgcccagagaccaattgtcgtcagaggaaaggtactcttatatcctaaacacgtggagatttgtgcttagtttaaatgtagtttctccctgtcactgaacatatttggacacatgaatttcaaattgctttctctttcaataatagtgtgatggctggcagtgacaacaaagtaagtaattttataagagaagaccattgtatctccaagctctagtcctcaataaacatttattgaattaattaatcaaccaggcaattgattgacttagaaatacttgcatgggttattaaaggtatgttgttctatttatttatttattttagagatgggttcccactactttgccagggctggactcgaactcctgggcttgagtgatcctcatgtctcagcctctggaacagctgtgactattggcctgtgccactgcagccagaggtgttctgtcatttttaaagaatagaaaatagtgatttttttttatggaatatgtggcaatattattgaatgtcttaccttcttaggaaagaaaatgaagtggttgaaaacaaagttagagctgaagagttaagtttctggtgcctgcgttggagagttttgctgattgatcctgtcatttttaaacaatatatgctaccaaaaaagaaagtcttctaagccccagggtccagtgctggtaagtgagatgattttaggtgcaaatgagtatttttatagtaatgattgtatatttaatgggcatttaaaaaattcacatagatcgtatcacataactccagcctccattcctacttctgataacagctcccagacttttctgtgaagagctgcagtgctgtcattggagtcagtttgggtgagactatcaatcaaggtgctcctctttgctagcaaaggtgtgtggcaaatagatgatgctctgttcctggaattccaatgaagtgtcacagagttttcagtttaatccgccctgtgactgcgtgatgattcctgcgacctctgaccctggggctgtccgagctcctctctcccaacccctgactcctctgctgatgttttcactctaggagttaccctgtgtccttccaatatgctcttttttattttttaattctgtatcactagatcagtttttttttttttttgctgattatatttaaataatcctgtgtcactttgcgtgtcatggatatttttgcttcagaaaaattaacatcttaacttaaaacataaattgttttaaagaaagaaatctgaatacataattgtacagataatactcagatgtagccaaaattgtgaggattggcaaatggctaatgattgggaaacaataaaaactgccgttaacaattagcttcctgggtatgtttaggcattaaaattggagttatcttgaaaaagtcattgaaaatatatcaaggattgtattattgagctgatcctattaatgaaaaaacatggacttggacaggataatgtgctaattaatatattaatggtcttcaaggcctaaaacaagttttgaaaaggggatgatagtatttccttggtcaagatcatgtctttttatttaaaaacacttattgcctatgtcacagaatctcatttttcttttctcaggtagggtattttatttattttttatatcattttccacaattagtaaaatactaaaggtgtaaatctctgtcagtcaaatcaagcattagtgatgcagacaatgtgtatgtgtgtgtttgtgcacaggaggcatgcctctgaggctggatagttccgggtaggagtgttagtgatgtcagccctgtccccactggacacatcgtcataaatgccatgagctcctctgtctctgtcccaactccaaggcacaagttatgaacccctcctttattggtcctcttacctagaggttctgagttctgttttgggatagaaacaaacactgaagatttctatcccaccagattcctatttgtatctgatgcttttatttttatttcaaaaatatgattttaaaattttgggatgaagaccgggctcggtgaagatgttgacacctgaaaatatcttcagcaattacgttttccaagtaattgctgtcagggaaatagcaataagatgtgcagtttacttatgattccccccaataatctatttcagggcaagaaagcttcaggtagtggagatttcactttgaaatggcataacaggctgggcgtggtggctcatgcctgtaatcccagcactttgggtggctgaggtgggaggactgcttgaggccacatagcaagaccccatctctaaataaaaataaataaataaaaattagaaaaagagaaatgacataagactcagcaattgactatgtttccaatatgacctttattgagcaagtactgctgtgacgtttaacatcgatcaacataagattgcaaactgtgcatgtcaacgaggttctcccatgaacaaaagtccattttaaatgcaccagtgaggtaaacataattattcatatatagctttcttaaggctgagttctgtgtttcgtttattgtttttggctcagttggtactttgcataatacatctcaagacatccccccttaagtgacccccttccaacagcttaggaaatcggcaaatttcccaggtacatacaatatcatgcatttgaatcccccaaagactgaggagggagcaccctgagcttgcatgcagtcccctcatattgcacaaagtaaaatacaatgtctggagcccccatgggagaacccgttctgttttgaagctgccaatcacatgcattttgaaattgtcatatggcttaaccttttgcaatggactcaaatcttagtcactctgggtgacttcctttactatggcgtgtgaagtgactttttctacctttttagtagacactagtttctcctcaaaggtctcttcatgctcttcaaccttttgagtgacggttacagatttagtgatgtatttggtagcaccatctcccccctcactggtgattttttctaccgttttggtcaccaccactttctcctcacttttatcaccccccttcttttcatctgctgggctcaagtctaggccattggtgacaacgcctttctcctcttccctcccactgcctttttccttggtctcctgctctacctcctcttttccttctacctccccattgacagctatgtcttccttcctggatcccttggcacctttatcactcccttcctcctcacttcctccctctcctcccgctttctccttctctttctcctgctgcagtggcttcccctcttctttggtctctttctccaagtgcacctttaccgatttggtgatggtgaccacctctgccacagcttcctcctttacaggggactcagctttcttcttctctggcacatcctttggtttctcttcctttttctctaccttctcttccttgggagcttccttgacttccttttcttcttcctctttctgttcacctttccccacttctgcttttgactttgcctcttccactggtgattttggcacaggagatttggctttctcttccactggtgattttgacacaggagacttgcctttctcttccactggtgatttcggcacaggagacttgcctttctcttccactggtgacttgggcacaggagacttgcctttctcttccactggtgacttgggcacaggagacttgcctttctcttccactggtgattttggcacaggagacttggctttttctggcttttccaccttggcatctgccaccagctcctccttggtagccacttcctcactcttttcctccactttcttttcctctttagcttcggcttcctctccttcagcttcagcttctgtttctccttcttcctgctcaccttcctctttttcactagagccttccttctcggatcctccctcttcggcttggtctgacttagctccctcatcttcttcctcctcttcttcctggccttcttcttcctccttttccccttcctcttctttaacttcaggtgcagttgctttcactggagactttttggcagctacttcttcttcttcagcttcgggttcctcttccttttcttctgctgcttctttcttctcttccttcatggaaacggccaattcctctgtaatggctgtcagggcctcttccatttctgacttctcatcctccactttggtttcctctatgatctcctcgacaaatttgtgttggaccttaagcttgggagcttccaccttgggtttctgaatcttactggatattgtgattgggggtcggtgtgtatacagtggcccagtgatgcttcctgcaaatgtgctaaatctagtctcttcaccctccaggagttttctaaggagaaaatccaagaacataagacatagtaaaaatttcactaggccttctgagcttcattacattctgggtattgtggtagctacctttgaataaatagaattacataagtagaatattctatgaattcactataatacctgctatcacttactggcatattacattatactcagtgacagagaaagattctcctggactgccagacagttgccccctacaatgactaaccttgcccaatagtccactaaccacacccagctactaagtcttggccctgcagtagagatccattaggtacaacatgaatatgctgaaaaacttgttagtggccaaatagcaaaaaacaaaaacaaaaacaaaaaaacaaaaagccataaacaaaacgcccccaaactccaaagccaaacagcctttctgagagtagtcactttcttaaacgtttagattttcaggtgtatcgagttataaatttgttgataatttttatcataaagtgtctatttaatgtagttattcagctttcctgaaaagagagatagctctgtaaatgcaatttattctcgttatattataactaccttattggtagcagaaaaattttaatcaacgattttgtcctttgcgcttagtcaacagcaaggtcacttcagttaatagacctataacctatctcactatctataaaacgatcatatatatttgtgtctatatatctagatttatatgcatatgcacatatgtgtatctatagatctagattaatatcatacatgatatattgatataatttatactacagtctagcataaaatataatacatataaattatctacatatataaaagaactatatctatattctatcattctatatctattctcagccagatgatggcaatagtaagctatataacagagaaacagagaaatagaacgtcctggtgtttgtccttgacattatacatttgaaaagctgaaaccactagatgaaatattagaaaccaaaactctgttcatgcttccagcatttgaaaacatttttccataaaaagtttaagcatgtgcattgagattaatctgcacctcctttgtgtaattcaaaaaccttttgtttctactagtattcattcttttaaagctgcataaaaagagataaaactacacttgcaattctttagaataatttctttttaagtaagcaagataaccaggtgctgagttgatgcctgcaccctgcctgctttaacttaagtggtggaagctctgccggaacagcctctgcactgcggttagtgttccggccacgcacgtagtaagcatcgtacctgtacgcagcgatttctatatccagagccatcttgacgttgaggaggtcctggtattcgcgcaaatgacgagccatttcccactttgtgccccgaagctcattttccagctgctggatggtgtcctgaaacagacacagagaatctccccagactcatccttgcaaacagcaacttccttcgcaaaccacttgctaccccttccccctggcctcctcccgtctccctccacttctgcaaacctcgctgacacctgactcccagccccccgtcccaccccctttttcttttaaatctaagcgattctcaaatgaacatacaagatcagtaagacaataggacacttcctgggcacatcacgcacggagaccagtggacttagaacacgtctcaacaggacacaaacatgcatggggaaactccatggctgacctggccattcccatctgagccctttgggctgaagccaattttgagagctcttccgatcactgccggaaaagtagagaatacacgcgtttctgcataagctatcctaaagttgctgatttatccactaccgaattcatccctcctgctttaaacgtgcaagcgtgcaaaattagaactggaaaagatgcacgtttctgaaaaaggtcaagacccttagcagctggggcaggtgggtgggggcggagtgtggaggatgagatgggcgaggacgctgatccgcaaataccctaggtctgcggcgcgcgtgctctagcgagcggccaccagggagcgcggcggagagggcgcctgggcacgagcccaagtgtcgggggcgcgcggcgctggcgctggcgcaggctggccgcgcagccgcggttcctacctggtagctgctgaggtcgtggttgtggcgctcctcgatgtcgctgagctgccgctccagggactccttggtgccgcgcaccgactctagctcgatgctcttggactgcagctggcgccggtactcggcgatctcttccttggcggagcggatggcctccttgttctgctcggccgcctcggtgagcttggcgtagcggcatttgaaccactcttcggcctggtgcatattctggtctgagtggctttcgagctgggagcggatttccttcagcgccgtcgagatgtctgtcttcaggtagtctttgcgctccaccgtgatgtgcgatgcctggatctgggccagaaggtcggccacctcctcctcgtggttgctccgcaggaaggccacctcatcctgcagcgactgcaccttcttgtccagctccaccttgaccagcgacgcctcctcgatgtctttgcgcagcgcgcggatggccgcctcagtgtcgtcgcgcaaccgcgcctcctcctcaaagcgctccttgagccggtggatgtcttcctccaggtggtccgagtccagctgcacctgagccttctcgtggttcaccatctccagggtggcgcgcagctcgcggatctcctggtcgtacgcgtcgcccagctgggcgtgcgaggcctgcttctgccgcagcgcctggatctccgcctcaatctccttattctgctgctccaggtagtgcaccttctctatgtagccggcaaagcggtcgttcagcccctgcagctgctccttctcgttggagcgggacagcttgtagtcgccgccgggtccggagccgccgttgagcagggacgaggactggctgaagtcaaggctgctctcggcggagctgagcatggccgagctgtaagcgaggcgcggggcgagcatgctgcgcttataggaggaggacacggtgctgggcgagccgcgggaccacgactgcgagcggaagccactggacggggagccgctgacgcggctgaagctcgagcgggtctcggttacccgccggtaggcggacgggttgcccagcgagtccaacgtgtagctcatcttggaggccttggggcgtgtggctgtcacagcgttctgccggcctcgccgcagcccatttatagccgcggcgctggtcccgggccagggccccgccccgtggaggcggcggccgaggaggcggggactgcgggcaccggtcggggaggaggggaggggggcggctgaacggtgattcagcgcccgctccacgtgggcccaggccgcatgggaacctggacttttctgccctgggcccagcccctcccccaggtcccctttcagtcccaggctacttgtagccgggcattcgccttctttccatttctcacctcccgattgcgtttcgcacccttggtgcgaatatcgccagcgccctttctttgtcactgtcccgccgttcaggcagcgcttccccgacccagtggtccccttgttctttagccttctaccctcttatcctcaaggctttctcttattttgccctttccctgatacttttttctttacccatcttctgtgcttaatttcatccccttcttttttggcccctcttctccttcctactctggcctttagtccagttcaccctgcccttctctcagccccttcctcggagatccttttcttccaatctttccttctccccgtctcctccctccttccccttgcattccctcttttcccctcccccaccctcatcttttcttgcctccctccccttcccccaccccttgtcttaaagcagctggagatgagcgccgaggagctgggtctagaagacaaaacaaaacaaaaaaaaagactttgcggaacggtctgcctgaaggcttcgggaaggggacaaagagaacaggccggggtagttatttgtataaaaagtgggatatggcgtttttaacgtttgggggacgtccgcagcttccgcaggggcagaaggtaaggcgcttgtgctcgctatggcgccggcagcaccaaggacagcgcccaggtcggcgagtgggaggtgcagccacccggggggcttgtcacccagcctggcctgtcaggttggcagggggcagggggttcccttccccctcttctctccgagtaaatacaatttaaacctgcctgtagtgactatctttgcaggagcgaagctggaatcacaggctaagacttccctgcaatgcagggttggcacaatggacagatcgcagattttgaaaacaaccaaaattcattaaagtcagttaacagaaatatatacttgtagcccagtttgagttttctaacatatggtggtataggaaatgaagagatacagggcctgaaatgtgaaggtcaaatactccttggaaaggagaatttgaaatctgttgggatgaaaagtccagggaaatatagtttttcttaagtttggacacagacaattgccttgtcatctttcggttcagtattccctatgtgtaactgcaatgattgaaaaggcatctgaattaactttaaattgatttaaaagttgcggaacagagtcaccacaaccttgaataaaatcagatgttttcccttcatttaaaatgtaatatatttttcgctttagattttaatgattgatttggaatagattttctatatcattaaacatgtttatgcaaacaagaactctacacagacttcttgctgtctggtgtactcctgttaaaatgtccctttattttgggtagtgctttgggggtaattcaggttaaaaaagttcagaatactacaagataaagtgaagaagagattgcagaactaacaacagcgctggggccacaggtacaagtgactgaatgtgcaacgcttgctatgggtgagaagaaactactgcttataaaaagtagggactccagaccgaaatagcttcttttcacagcatgtttccttaagtccctgttttattaaaagacaggatcatattcatcagtaagtaatcaggaaaggggtgggtttctagaggttttattttttatttttatcagctcccttggcccatctgtattaaaatagaaataatgttttaaacaggaggtgctaattttgggagttacttttggtttattaatatgaaactgcagtatcgcaggccatgtaggagaaggatgttctagtttgctgagagaccttaggcaagcagagcccatccatgtcttgagttgttgagagagacagatgatggaatgaggggactgacttgtgaatactgtaaaaacaggattttctggttttatgtagataaataaaggcaaggagaaagaaaattccctgccttctgtaaagtattgcggatgtcaggctggactcagcaggataccatctagataaggccaaatgctaattatgcagtaattttgcctttgttgcttattactttctgcttttattgaaatatataaaaatccttggcaatttcatggtgcacattcactgcaaactctgcaatgagagtacatggttaaccggcagccttctgctgttaattttctttagggctttggaaacgagatgactctgcagagagacatttacaaggaaacacatgtctaacttcacaattacccagttttgccttgtatctgaagtagctgagaaattgttcagcttccagctggttacagaaggaggaaagtgttgcgtacaaacaaaataagtcagttactcaggctacatctagtgcctataacttaaaattgtaacttcaatgtcacatgatatattgttcaatctgggcactacaggataatgcaaagaattaaaacagttgttttattaagaaaaaacagttcccatggcttaaaaaatgatggatccagtttcacatttagcaaaatgttttcttttatattaaactcttccactttaactactcttcctaaaggtgatttgaaggttatacccatcagtaaatttagtatgaaaactttttttaaaaagctataaaagatgtttttccctttttgtctcatagttttgaagaatatttaccatcttaatagttttcacagaaagaaatgcttttgcatttttttaaaccctaagaacactaaggctatgaaatcttctcaaaatattaaaaagagagaaaacaatcatggcaactcacccggattaaccacactgcattcatggaattaagtttgactacgatacttttgtaatttattctaaatagaaaagtttctcatatgatttagatgtaagacattttaaatgaaattatctctgaattgttgtttcataagctacagtctgttttgaatcactttatagagaaatacaaggcatgctccaatctatatgttccttcagtagggaaagtgaaaatgttaactttgcagctaagagatgatagccactgtcaggttttgtagggtgtcatctaatactgggaaaatatcatttgcaaaggtggtatatttactgggtcataaaataaagataaaaaataaggagttaggcattttctcccatctttccctatttccttacatttcttcttttaaatagcatttttggatataaaaaaatgcaaggaggatgggatgtaggaactggatagcaagaaagatactccagatggacaacgtcactttcaaattggtaggctgaatccatccaagatgagatgatctgtactttctttcaacctattgtgtcttgaacttaatccgtttgcctgggatctggttctagaactcataataattatttataacctgtcctctgctaattgtttaaggggttgttgatgtaggaagctagggacttagtctgccgaagcaggaacacaagaaaaaggaagctatattacatatttctacttgatcctcaggatgtcaaactttaaaagcagtgttgacttttgattttgttgttgtcaagagttgaaagcaaaataaaaatattctcaggggagaaagactgtttcttgtcagggaaattgggatgtatatgtatgtccctattgtctttgatcaaaacaaatccatctagaccacagtgttccttttctgtcattaggccactgaaatggtgtttgtttcccttgccaaatattttattctttgaatattgccttctatttgtcagttactgttatgatgaagttaattgaagtatttacaaaacttaaaacatttaatctttattatattccaaatgttaaattaatcagttttaaaattctatatctggaaatttcatgtgtgtggtgggggaaaatttagcttttggctttaacatagcttgctgatttttttgctgtgtaatgctttcacctctccactgtgaatcctttctgtgaaagccaggggagaaagatttagaattttaaaaaagtacttaatagagccttggtaaaagtgactctaaaaataaagttcagtagatgcataataaaagagtactcctgtattaattttcagcatgtttttaactgaacccattagctttacctataaagcagcaacagatgttgatgatatgcacttgaattttgaaaaccctgccttgcacgtaactgcaccagtgcagctatgaaatatttatgacatattttatcccaagcttaccaaggcctgacttagcaagagacataattcttttattagaaactcttaattaaaatgagcttcgtaaaactagagcagatcaatgatctttggaccaaatttctgaaaagagctaaacctgggaacagaaagtcacaaagaagccccacctaataattcagtctcattgtcccaggactgggtgattttttttcaatctctgcaaatttgaaaatcaatattctttcataatcctttgaaaatgggctcactgtcatagctctgtcttgtcacttagcttattaagaagagcatctattttagaatacttaactcacttttttggttaaaatttatatatatatggagtgtagaaatttgcaaaatggagagagacaataatttaagtattttcttctagtctttttctctgtaacttaaatataaataggatctttctgtttatataatcccatgccctgttttgtaaagtaaatatatctgaataagtagtgtgctatctttagaggaaagaacatggtcctgtttgccatgagagctggactgtagctcggtatttaacttgaatttttctcttaaaaaagatttggaaagactctttagatcaagaatgataaaataataatagcaataattaataacaatagtagatcgagaaagcctaatcaggactgatattaatttctgtctcttttctgcctgcctgtctctctctttggttattgagaggaatgtcatcatgaagctgagggcggtggtgtgacagctggaggtggtaacttgtaataacttgtaatgtggtctagtcaggcctaaatactgtgttcttttacacttagtagtaccctaaatcccaagccatcatcatcaccaccaccatcagacttttacatttggacaatgctttatatcaaagaagcaaagcaaaacaaaacaatgtattctcatctgagctgtgcacaaattattatttccattttagagttgattaaattgctgatttgtccaaggtcacacatctggaaagcagtggagcctaggccagaactcatatcttctgacacccatgccaacattagaacaagtttctttagtagaatataaaatccagtctcaatgagcatgaaaaataaaagtaggtggatcatagtcatatcaataaaaataactggtatttattaactactcactagatgcttggcactgtgccaaaactttacagagttctctcatttaatcatcttcacaaccctttgagatgacacttttgtggaaagtgcaattgagcacagaggcacagggaggttaagtaccacacacagcttggaggtggtggaatgaagacaggaatttaggagactctgactctggaggacagtcctcagcatgatcatcagtaggccatacccacgttaaaaatctcatttaaaagctaattgttgaactgctaggtcatattaaaaagattaaagggccagctgggtgctgtggctcatgcctgtaatcccagcactttgggaggccgaggcgggtggatcacgaggtcaggagttcgagatcagcctggccaacatagtaaaaccccgtctctactaaaaatacaaagattagctgggcatggtggtgcgcgcctgtagtcccagctagttgggaagcagaggcaggagaatcgcttgaacctgggagatggaagctgtggtgagccaagatcgcgccactgcactccagcctgggcaacagagcaagactctgtctctcaaaaaaaaaaaaaaagattcaagggccactatacattcttttgctgcatttttactatttatataaaaataaaacatttttgtattttttcagctaaacattatttcatcgtttctgactttattaaagacattaagaataaaaacattgaattacttgtctttgttatatcatattctaaattaattttctatgtaatttgaagtacataaaattcattcggctagtccatgctctatggatgatatctctaatcatgtagctattattttttctggtatatatttatcattcacatttatattcacttttggtttggtttttgggagatttttaatttgtactatacattaatttatcatgatatcatttatttacatttatgtatatatttatacacagttgaaaagacaatcttttaatcatgtattcacaatttttcgtagatgtcagactctttaaactaaatctactttgagagatccaataacaagcttttgaatcttggcagaagaaaaagcttggcccacaatcttcagcagcgaaggtttacaataggattgttggcaaggaagcagcttttaaaatctattaaaatagtgaggagccagacgtgaataattttaagtgaatctcttgatcatctattttatatactaaaatcagggttatgtgactgtacttacataggttgcctagagaccagtcagccttcatccatttttgttatttatgggacaaagtgctctgactcaaccttattttcatttgtataaatctgcgttggtttctactttatcagatagggtcaaagaagagaaccgtttctcatttttccagagcaaaagttggccttgaaaagaaacatctatgctatactagtcatggcagcaagcagcttctgtctggatctagattacctaaaattattaaggaatgaatgcctagtgataaaaatccttcctcagccaacgtgactcatttcatacaatttgttgtgttttctcttgcctcttggtaatatctgtggccccttctctcatgctctatataccttggaaacctgcacttttggaaactctaaagggtgagacacttgtgtactttcttgcacaaggtacactcatgttaccaccaagccatttgaagtttagtgaagaccctatatcatattagcgaaactcttctccttctggctagccagtctcttgcatgcttccacgaccgggtcttaggaaacctctagttacccttccctgtttttgacccatgcattcctcctctcagtccctgaacttgattgcctgtggtctagttgggtactaccacctgctggtcatttagataatgtctcaacactgaccacaaaattctaactgcagtcttacctatatttgtacatcccacagtgttttactgatagtgagtgcccaataaatatttgttgtgcaaatgagtaaatgaagttctatctttttccccctaaaactttcattcaacaaacaatgtcttcagtatcaggcactgtgctggccactggggaaacatgaaaggcaggatcttagcttggatggacacagtctactggaggattcaggcaagtaaagacctagttacctcgagggaactgtccctaacatagctagaggtaaacaacacgtgtcatgagagcacagaggatgggcgagtaaaccaattggtaagagaggaggaccctctgtgagagctttctggagcagacagcatctaaggtaagttttggggcataagcaggaattgtatagggaagaagaggaggggagggcaggcacagtgtcatcaaaaacctgcaagtgactgaaatagcagggagcataccagaatagagggacggggttatgtagtacaggctggaacgcatgagacacagagtccaggctggaaagaagcgggggacgtgtagctcaggagagaaaggaagcatttagccaaggttgacaagacagagaacatggagaccaggctggagagggaagaagaggagaggccatagggggcttcctgtgtcatgaccagacctttgcattcatctcatagctgattagaggcagttgagtatttaagagggatagtgatctggtcagactggtttgttagaaaaatcactttggcagaggcgagtggaatactttggtgggtgaaagggatcagaaggtggaaaataaacttggagactatggcaggaatccagatgagattagaggaagatgcaaattaagaaaggtggatgagaagaggcaggtactactagagtggaatggaagggcttgggggcagagggagacggcgatgccatcccctgcatttatttcctgtttctgctgtaacaagctgccacaaacctgctagcttaacagaacacacattaattctcttacagttctggaggtgagacgtctaaaattggtctcagtgggctgaaaccaaggagcgggcaggctgcgttccttccgggggctctgggagggaatcccccgccttatcttctctggtttctaggggccacgtgcattctttagctcatggcccgttcctctgttttccaaaccagcaacgcagcatcttcttgcctcactgacctctgctccatctcacatgcccgtctctcactctgacccccctgccttctctaagacccttgtgatgacactggccccctgataatctatattaatttgctagggctgccataacagactcagtggcttaaacaacagaagtttatttatttatttatttatttatttatttatttattttttacagttctggaggctggaaatctgagatcaaggtgtcagcaggattgatttcttctgaggcctccttaggttgtgtaggtgccgtcctctccctgtgtcttcacatggtcttcctgcaatgtgcctgcatcataattttctcttcttataaggaacctagtcattggattagggcatatcctaaggacctcattttagtttaaccacctccttaaaggccctatacatattcagaggtactgggggttagggcttcagcatatgaatttgggtgtggacacaatttggcccataacaggattcttatcttaatcacatctgagaagtctcctttgccatgcaaagtgacatattcatgtagtgtggggaatggatgtgaacacctttagagaggggccatttttcagcctaatacatcccccaaaatataaagtacaggagaaaaaccaagtctaggggttgaggctggatgctggaatttatgtatgccaaacctgtgatgcctatgaagcaaccaaggaaagaatcttccaggtgattgaatttccttgactatagagaaaggcactactctccactctgtgtactgcatacagtgtagggcctagttatatattaggctggtgcaaaagtaattgcagttctcattgaaagtaatggcaggctgggtgcagtggctcacgcctgtaatcccagcactttgggaggccgaggcgggcagattacgaggtcaggagatcgagaccatcctggctaacacagtgaaaccctgtctctactaaaaatacaaaaattagctggtcatggtggcacgtgcctgtaatctcagccactcgggaggctgaggcaggagaatcacttgaaccagaaagttggaggttgcagtgagccgagatcgcactactgtactccagcctggtgacagagtgagactccatctaaaaaaaaaaaaaaaaagaaaagtaatggcaaaaaccacaattatttttgcaccatcctaatacagtacttttcaatgattttcttaccccagttggtcttagattcctagctagattgcaagcccgttggtgctgttgtcttgttactctgttgtgtctaaaccactccaaacttcattttcttaatttgtgaaacagcaataataatagtacctatttcataatgtggttttgggggttaaatagtgtgtataaactgctagtgcctttgacagtgccagataaacagtagttattattattataattatgatgctcataaacctcccctatagtggttggcatcgctctgggcgtgtggtaggttttcatgtgctaacgagacgtatatcacataaccttttcatgaagagtttaaagacttgtcagagagataagaatttacctagggtaaaagagaaggaaattgatgtgctttagctcaccaggtttggcaacaaaaatgttagaatgaagataattagagacctattcagccacagtgttattgggtgcttgattttaggcacacagttcaatatcaagataagaggaaaaaaattatttttgcataagaccgagtatgtgcatgtatctaacaggacaccccttctttcccctgcactcaattttttgcatatggacatacataatgagatagaaagttgccaggttgcagattctttcttttgtaggagctacgtgttgccttaaagtgaacagatcatgttaccctgaatctgcatttagccttgaatatagatgaactcttttgtctcagtgacacaagtgacagatctggcaaagcacaaagctgaagttgcaaaaagatatagacaacagattataccgtaacaagcatttggtataatctatgaattttttgataacctaaatcctaattttcttgctaatataacacttagattcttatccattttgaatgcttaggtttatgcctttcatgttttttatttataggcagatcctatcaatagatgagaatcagagagaaacaataaatacattttagcaaaaatagtgtggagggaaaatagttatttttcacaacatgtttcatgtgaaaatatctgacagacagcttattttttttttggcaaattgctaaggatccagaaggattagaaagtcctcttcctcatgtcatttgtctaaaatactaattgtcagaacactccaaaacctcctgtgcttgccagagtttttttttattttatttttataatcagaaaaaaatacagtaatgtgcaaatctggatgcaaattacctcctgtttaattacattataggtgtaaattacccccaatgccaaacatttctgccctgggttccagaactgtgtgttgcaattacatctttcgtgctcctttaaattttgcagtggtaacaaatgtgtaataccaataattatgaaaaccacttgctatgtgcagctaatttaaaatctaggttcaggattctatatttgaaatgtgaaattcaaccctgtcaaatttccatcaacacttaaatctaaatggttcttctgttcacaatgtcagaaataagaagtgacaaagttaccaaaggcaaagactaagactctgggaatcagtgaacaggacagcatcagaaggttccgtgaccttgaacttcccttggccttagtttgctcatctgcctaatgggagatgatatctattctacttaaatgaaactgctttttcaaagactaagtgagatcttgcattagttgggtaaaaaggctaagctgattaacgagagacccaatattacagtggctaaaagaacaaagaagcttattcttcttttgtgtactgatcctggtggggaggtggcctgttttgtactgtgtggtcatcttggggttctagttggaaatgcgtccactatatctgggttcagaaaatgagattttaatgaattgattgggccagagggcatgcttagaattccgatattatggcactctgttcttcttgaatgtttcatccattactcaccccctatccagattctacccactagaccacagctccatttctgctttctcaggaagacttcattgcctcctctctcctcttaagttctcccagcatgtagttggcatcatgtgatttggtaattatcccagctcgtattgttttatattgcatatgcaaagaaatcttgttcctgcaattaaactttaggctctttaaaggcaaggacctcttcttactgctgctttatccttttccactttcctcttctcactgggtataaaaataacatgcaatgtacacgtcttataaatagacatatcgaattaaacaaaatcaaagagcacattagagctgtgatttcctagactcagaggaaacagagggttttgacccttttccttgttttttattaataacatggttaggtttgcttaagtttagattttggattcctgatgtcctgatcagacttctctatgatatcacttgggaactctttcctaagtcccgaagtgtaggtcaggtagtctaaaaacaagctggcaagagcctggaattgtggccctccaggtatgtggcttgcactagaattaattgttgacaatggcacttctggattctctccatatttctgcttgtcccctgtattatgaaggctgtatacagccacatcacctttataaaatacattttaactagaaacaatcacggggataattatgcatttctgcatttcatttacatagtcaatggccaattaatgtttggtgaccagatggtaaactggaaagtaattgatcttttccaatcaatatgtggaaaacagttgactttgaccttttggatttgcttatcttgaggtgttgtatataccacaagctgggcattacaggcacccatcaattacatcgattgcccttttgattttcccttgctgctgagctggagttgaaatcatgcattgtatctactctaagctggtttgcacagaggaagagaaaaaaggaggaagtactttggtgagtgttgatgtttgctagggaccattgtggacagcttgaacctcagttttcagaggaagactaagaggggacgccttaaaaactagtggtttctctcaaggaatctgcctcattcctgagtgtcaaggacagtcgtaatgggttccaatcacgcattgcctctgaaatcaaagtgcagcatttgatatcttgactgatttcttcttggcctgtaactctgctattttagacaaatctgcgtgggctcttgatagacaggtagtaaaaatagcaactgtgtcacatgtaactttttctaattaagcatttacatcacattttgtatttctaaagtgatttggaagcactcagattctttgccagtgacgatgcttttgtgagccatattggtgaaagcattttaaagctaccttaatgtaaaagagatttgagtgagcagcattggaacccactcttgggtcctagtttttttttgttttgtttttgattttgagacagagtctcgctctgtcacccaagctggagtgcagtggcacaatctcggctcactgcaagctctgcctctcgggctcaagctattctcctgcctcggcctcctgagtagctgggattacaggcatgtgccactacgcccggctattttttttttttttttgtatttttagtggaaacgggttttcaccatgttggccagactggtcttgaactcctgacctcgtgatccacccactttggcctcccaatgtgccaggattacaggcgtgagccatcgctcctgtccgggtcctactttttcttagctcctgatttgctctgcttcaattgataaaggaaaatgtggagtctgaggatgcagaaaaggcctttgaaagattaattgactctaggcgtaatggtaacaaaacggttctaggtagatgaaaattatcttgctctaaaaaactattttaagaggagaagtctacatttgaattaaaaagaagcattttcttaagtgggtgaataaaaggctgctaaaaatacaggagtatctcttggggtaatgctaactaaatacctcattaaaaatcacaatgtagaaaatttacccccagaaacgttgatacctttctccttggaacctaatgaaagatcctgaaacattattatttatcccattcttttccatctagtttataagaagataattatttcctttcatgtactattcctctggtttcacttttggtcattgttcatcatattttgggataacttgtagttcttacaatttaaaaattacctcattttttttctagtgcctaaagcctttctttgccttgtaccaattaggtcactaaaataaaaattgttccaaaacatggttatttgtaatttgagccacctcactgctcaaatcactccgtgatttttgtcaatttcatcttaataaactgcctcacataattgttttttaattcactcgctcatttattcattcagtcaaacagtcagttaccattccttggagtcctataatgattaatatgttgggctgggagctgtgggtttttcccataggccccagggtgaagggctggaagttaaaaagtttaaatctgaatattgtcagataagtttctgattgtcaatgaagggttgtttctttttcagaatgtaaaagtgactaagtatagagtccttctacagttcaaagcaaatgctatcccattttctcttacagtatgctagacagtgtggtcatcattggaaaattagaaacaaatgttacttaacctctgttctgaagaagccacagtggagacgacattgtgatatcattaggtggagaactccagctaggagcaatatatagaaaggtcaatcatgtttgagacactttatgtagatttgctttaatcctccagttgacactgtaaggccagtattgttgttcccattttagagataagaaaataggctccaagaaatgtgtcacagctagtaaaccaaagagctggaactggaacacatttttctcacatatatgatttttcttgtggattcgtcagttcacgccaatctggggaatactctggagttagcatgacaaaaataaaacacagtctgtatttttctggttccttcctataagcccggagcctagccccacccctgctcaagtcttctatctggatcaagtgacatgatcagatgggtgagtgtgtgtatttgggggctggtgtggatataagggtgggctgggaagaggtgcgtgggcattttctctagtttgtgagtgctaccttcactcattcatctattggagcacgtccattcctccctcactgaagccatttttcctttgcacttctgcagtctctgtgcggaggctggtgggtggaattatcctatgcctgctgggtcgatatgctcaagtgtaatttggccacaaacccacatggtcagttttgttctgaaaatctgctgattttcatatgttgcttctctcatcctaggattatgccattttccggagggtcactgggctgggagatcatctgagaattcccacagcatgatgagcttaaaaaccactgaagttgcataagcccccaaagctacaagatttatgtactctgacttctcctttttaggtgatcaaggggttaggaggttgagtgagaggaatgagtctaccaacgtgggtaaaatacagaccagtacctgggtagatctggatatacagggggcacatagcttggtgtatgttctggaattcagtttactagtttgaagcctactttcattttgtaagatggtaaattacagacattaagttgtaagagcttttacgtctttatggataaatggaccctgagtactaaattttgaccttgaactgcttaagacttctccaggatgatctgctgatcagtagcactcaaatatctgaaaccaaactcttggtcttctctcaccactcttcctttctctattcatgtcaccatcattttcccatcattcttgtctgaaatctgggtatcctatttgatgcttcccttcctagttttcctaccatcaaatctgtggtctagtcctgtcgttacatagataacatttcttcctagacttcactcaagatgtatctgtcagataacaaaaatgtcctcagcatcaaggcagatttgggaccggcacactgtgtgtcaagacagtccaccgacagtatctatgtcaacagggacagagaatgacctgcccactcctagtctctttatgcaaaagacagcctgaataatcaacttcttgatgttcttctacgttttctgaatttttttttttttttaggggaaaaccctcttcttgatattagcagggcttgtccatttatgcctctgatccacatagaatgctttgtctggccaaatcataggctcttggcagcattaagaaaatagattcaagatcatctggtctcagtttgtacgtgaaaaaatggaaacgttaaatgacttgttcaggtgtatttacctagaaaacagttgattttggaatccaaatgcctgtctcctaattccagagatgggactttgtttatttgacacccacttttgtttatcttctaagttgcagtgtgaggagtgcagtgcagtatgtgatggaagagaaccagcatgtatgtggtggggtgaaagacagacagaggtgtatgaattcacattcttctgctatgcacagtcagctatgggcacctgtaagtacagtctccaaggccactttgctcatatgtaaaaaaaaagaaaagagaaaggaaagcaccaggctttctttctcagttttctttttgctataaatatcagagccatagaaaccctttatttatcaaatatttattgaatcagctctgtgacaggcaccgtgagaggagccggagatgcagacttgagtaaagacgtctcaacccccaggagttcaaagcctagttcaccttctcctcacactcattgaagacagacaaatcttaatttgtaaaaagcctgatttattgaacagaataatgacaattgagaggtggaaggggtcttaatatatattatttagtctgaacttataatttcacaggtaaggaaacgggccatagcaaagttctgatcttccaaaaggccagaacttgcttcttagcatttgagttaaacctagaattcagacttcctggctcctaggcacgatttttacaattatactctatttacctcaaagtgggctgagaaaatggctgaatagctgttttcagaaacggaaaaatcaagtgagaaactgaaaacaaaaacccatgactggcccctgtaggcagagttgagtggggtctggacacagtttgtagtttgtttttaagtttatcaggaatttctaatgtgcagcctatgttgaataatgatgatagtagaagctatacaggatataaagtgaataagacatctcttgatctccagagactccttttattttattttttaaaggacagggtcttgctctgtcacccgggctggagtgcagtggcataatcatggctcactgcagcctcaaactccaggactcaagagatccttccacctcagcctcccaagtagctgggactacaggtgcatgccaccacacttggctaatttttaaattttttgtagagactaggtcttgctatgcttcccaggctggtctcaaactcctggcttcaagtaatcttcctgccttgttcccccaaagtgttggggttacaggtgtgagccaccacgcccggcctagttgctcccttctaatgggaggagagagatgccctttatgtctaccatggctctgataaaaatgtatcaatgtaaagtaaaatcatttgcattttaatcttgccaattaattctgtagagttgtagctttttactttatcagtgattgtttcttgaaattgagttggatcttatttatatgcctatattatgtctcaattttaatagtagacttaattagatttcaaggatagagtttattccactttccgaatgaacttactctctgatttaattataacattggaaagttgggtggctctggtgaaatgtagtcttccaactgaaaaaaaaaaaagaaaagaaaatgagtatctttaaactatgaggagatcaaagcctaaacataattgataacaaacatctttcaaccttatcttctctgttctacccgaactatctcagtgtgtttgggctgctgttgcaaaataccatggacttggtggcttataaacaacagaaatgtatttctcacagttctggaggctgggaagttcaagatcgagatacctggtgaggacctgcttcctggtccatagacagctatcttcttgctgtctcttcacatggcaaaagggaagagagatctgctctggggtctgatttatttatgtatttatgtatttattgatttatttatttagagatggagtctcgctctgtcgtccatgctggagtgcagtggcgtggtctcagctcactgcaagctccacctcccgggttcacaccattctgctgcctcagcctcctgagtagctgggactacaggcgcccgccactatgcccggctaattttttttgtatttttagtagagatggggtttcattgtgttagccaggatggtctcgatctcctgaactcatgatccgcccacctcggtctcccaaagtgctgggattacaggctctggggtctgttttataaggacactaatctcattcatgaagactccacacttatgagctactcacatcccaaggcctcaccacctaatgtcatcatactgggggttaggatttcaacatataaattttagagggcacaaacgttcagtgaatagcatcaacctagacaactctttaattattcattggttttcttccttgtggttagagcacaagtaggggtcttaggggttgagatgaggggcacttgcttcatcatgggactctgtcaaatatgtaaaggagcaaatttccccttgttatcagtagctccttagctcccttggttcacactaagctttctcttgactgcccatatttcagacagtaaccagctaccttctgacttctcattctacatccatagtttacagaattttactgatatatcactaaagaaaacttttagggtaggaccccaaaagttacctatgtgaagctgcaaattagaaataaaaacctgtatgacataggtaaacctttgcagtgctggtttcattaatgcttacattaactgcatgtctcaaagttaaatctaatcgacttgtttaagacaaagccagcctgtgggctccgtggtaagtctgtcctattccaaatttctttttttttgagacggagtctctctctgtcacccaggctggagtgcagtggtgcaatcttggctcactgcaacctcggcctcttgggttcaagtgactctcctgcctcagcttcctgaatagctggggttacaggtgtgcaccaccaagcccagctaatttttgtgtttgtagtagagacggggtttcactctattggtcaggctgatcttgaacttttgaccttgtgatccgcctgcctcagcccccaaagtgctgggattacaggcgtaagccaccacgcccggcttccaaatttcttaagctggctactgtgtacatggtttgctttcccaaaatgacattgtttgtgagttcaaggacagatccttacttgaaaacagctctccgactggctcgttggtggtgtctgaaactgtacagtgaaaggaactttaaaagcctgctattagcataaagtacttaattgaactttgacatcttagcagtagcaaatattattatagaaaaacaagagggatttgtgatgatatggataaaacagtgataagagacaggtactctgtctacttggtgagaaaatgtcagtgactatcgtaatgatgactattgagagtacatcagttggggaaaaaagagattggaaaaacctttgggagcttggcaatagcttgaaagtctagaaaacaggaatcttctgacagatgtcatgaaacatattgagtcaattttaggactacaatgacttatttaaaaatatttaaaaatatttatttgctatttccctgtaataatccattccaattgcataatcatttataacttacaaataattcttgcttcacaatttcattttgtcctgtcggcatcttggtgatgttaactacttctgttttatagataaagagactgagcctcagagaccctaaatgatgcttcaaggccccaaggtcagtagagtaataaatctgaggccatttctcctaaacgggggggaggccaaggcttttctcacgattctgcattctgcggacacttcagatggctgtaatttcatgtgaatcttactgtgtcccacgttgattggaaggtactgtggccaggggctatgctgacccttctcattggtttctccaagtgtctacagtggggcatctcagtcttggcggcccaataaaatccctgaggctcgaggctcactctgagacattctgatttaatttgctgaagatttagcctgggtattagtataattgtaaaaatctccctgggtgatgctgatgtgtactataaaccagattctaatgggcaggatcaccggtttatagtaatggctctcagtatgccagaaataggggtaggatgtttgtttatgagtgtgtgtgtgtgtgtgtatgtgtgtgtgtgtacccatgcccaccagattcacctaccagactttcaaagaatattctgaacaaggctctctcccctgggtgtatcagagatattgtctttgttcattacagtgtgatggggtcaggagagaagggagaagggtgttagatagagatttgtattttgaaaaaaaattatagatgattttattaatgacctgccttcttgcaccataaaaatacttcttgtgattgtgaaaacataaagtaccctcaatggttaattaacaaactgactgatttttcttgttcacactgtccaactacttggaacaggtagagttgtgcatcctaagagctgaggaaatgaggatgcagagaggaaagttaccctttgtcaggggcagaatgaactgcagagtgaatctttctgaaagacttgacttcagggacaaatcttcaggaactgaagggagattatcatctttatcaaagcattctggctaccaaaatattttcggagggttgtctggttcagtcgttcacgcagcaacaatttattgcatgtccaatatgtgctaggcacctgcctcagcactgaagatgaaatggtgagcaaagcagatgagtgctaacttgtggttccagaaagttcgattattgtatggagagaatgcttcagagagcccttgagggcttgcaggtggctcacagcacatctcagcatctgtggttgcaagagcaaggttcggggtggctggctagagtcaaaagaactagtgacaaagttagttagccaaacgatgccagctccaggggaaccagcagcctggagtgtgagacaattggggctgaactgcaatggacagttaggaaaacatttctacagtcagcactgccagtttgcaggttcagctcagtagccagattaggaattaaatatgcagacagttccctctactgggaagatgctattactgcataccaagcgccaggtggaaacagagatggcagtgagattttctggtttctgagaggcaccccattgaaagtacagatcaccccacaactcttgcgcatttacccctggctcctttattacatttctctttttactttatctggccatcacactgtcttttcagccaatcgcctgatagtactgagcgtgcactgggataggacaaggagctcctgtctggaaggtgcctattgtcttgttggggagaccaggcatgcatacagaaaccagctgagaagagctctcatgtgtgtccctctttcagtttttcctttgaagaggcttctttcctcttccagtttcctcttgtccccctgaatccatcctctcataatctccagcctagacaaagacagtagcccaaggcctgttctgtgcctctgttctctcatcgtagccaggtcatcttgctgcgtgcccttttgttatgcccctcacttgcttaatttaagagcccagacttgtgtggacacctcttagttactgtattactttgaaagtgactgcttattgtctgttcctctagcaaggtgtaaactcattaagagcaagaagtgattctgatggagcgataggcacataggtattttctctattactttatgttggaagtccttctatcttagtcttttttcttttgctagagggcagggaccttatttaattcatcttcgtttccttaacatttactacagtacctgctaatacttgggtctcaatgaacattctgatagaaattctcgaacaaagatgttgataacagcattattgataatttacttaaaaatgaaaatgaaaaaatgtattcaaacatagaggaacaggtaagtgaataatgttatctccatggtatggccagttattagtcaataaaattatactttgagggatgttcaaattcatggtgataagtttttcgtatcatggtaaattaaaaaaggaagctgtttaaaaattgagctaacctgtacaaaataggcacaaaaatagtgttggaaggaaatactaaaaaatgttaacagtggatctctaatttcctgtgggtccatttttttttctataatgaggttatattacttcttcagtcaaaaaaaacagctattactaaattccatggtataatcagtccacgtccatttttttttcaaggccattaggattccctgttgcatatagaatgaaaaccaaattgctttgtttggcaatttagactaggctcaataactaccatttagcttcatttttttccagtcttctttttctatattccatatttcagtcatattaaatttcttaatagtttgtattttaaaacaattttattaaaaatgcatacccaatgataaaaattttgaaaattctgaaaagcataaggataagcgaaaagtggctgtgagatagacactatcaatatttgtcaatttcctgtcttcttatatatatcagaattaatttgcttgcagatttatattcacatatgttttatatgtaaatactttgccacatatatataattctgcatattttgtctttcactcaaaaagcatgttttctgattgcattacaatttattgaaaattgtttttggcaaataatctctctccttaaatgatctcattgacttcgttgagtttaaatgtatatctctggctgagaattttcttttttgcttaataccttcctatcaattaccagttggacatctacatttgttactggccaggtccaggtccattctgcccaaatggagtgaatcaatcactgtggcataggttttgcaaaagaggaaagctttatctgtaaggccaccaagaaaagaggtgagaaaacagctgtcaaatctgtctttgtgaagataaggcttagggatattgacagtttaggggagtgggtggtctaagggatgggaagaggtggttggtagtgggggcaaatgaagtaaccaattcattctacacgagtgtagtcagagttcatggcatttcataggacatatgcacaggaaatggtggtgttagcatgatctggaggagttttttgccctctgatgtcaaaaggccacctctcgggtacttgcgcaggcccagttgaagggttagtggtctcaaccagtttgaatgagataggaggtggcccaagttcctgaaaaacaactgaatctactgttgccatggcgacctatggatgttatctatacagtagccagtgaaggttaagtttcagtgttcagtggtgtggcctttagctgctacagccttcagcttcacagaaaaatgaagaaaaaaataatgaaaaacaagcaaccaaaagcaagcaggcaggcagccctgatcaaattaacccgttggtttcacactgattggtatttcaaatgtaacatgccgtaaattggacccaatcctgcttctcctcaattcttcccaatttaggagttgagcacgtccattgaccaagtcactcctgagagaaactccgaagttatacttcacatctttacttcctgtcgggggttgaattatgtcatctctccttttcccccacaaaaaagacattcccaataaggtcacattcacaagtcctgacccccagtccttgtgaatgtggtcttatttggatatagggttcttgctcatggaaccaagttagataagctcataatgattcgggtgggccctaaagccattgactggcatctttataagggaaaaaagaatgagatttggatacagagtctcagaggcgacctagaggcaatagggccatgtgaagatggaggcagagactggggggatgcatctgcaagccccagagtgccaggagccaccaaagctaggaggaggcgaggaaggatcctccccaacagcctttggagggagcatggccccgccaacaccttgatgtttggacttctggcctccagaactgtggaaaatacgtttctgttgttttgagccaccaggtttatgtcgcccaggctggagtgcagtggcgtgatcttggctcactgcaacctcctcctccccggttcaagtgattctcctgcctcagcctcccgagtagctgggattacaggcgcctgccacagtgcccggctatttttgtatttttagtagagatggggtttcaccatgttggccaggctggtctcgaactcccgacctcgtgatccacctgcctcggcctcccaaagtgctgggattacagatgtgaaccaccatgcctggccctctctctttttttttttttttttaaacaccattccccagtataaaccaccttcctgtatgtctcttccatgccactctaatagccttcctaatgacctcgctcttatcccaatccttataacagcccctgtgagcttccaacaatgtgtctcccataccaggtctttcaatggcttcctatttcacctgggaggtgaacaggaatccctcaaaatgctaaatgatcctcctcctgccccctggccagcccatcacctgctgtttcccctgcttgccactcgggccaccttttaggtcctcaagtgctttagtctcctgccctcctcagggccttcacacgtgctgctcccttagcctggagtgcccttgctcccacccttcctggttaactcctaactgctgctcacccttctgttcttggagaggcctctccagactacctcatatatattacatttctgttgtcatctctcatgacactgaatacgtctccatggccttatcccagatggcactttatctttacttttgtgacagttggcttattgtccactgccccactgtcctagcttctcctctgatctttattttcatctactagagcagttcctgacacaaagtgaatgctttgaaactaaatattcaattaaacatgttccctctgactgcacctcaaggttattgagaggactcacaatagacaatgcttaaacccatctgtaggtcttgaggctttgaaagaggctgatgttcctgtgaatatgatggtgagcaaaagcaaagctggttaaatatgacctcttagaggaggtcagtggcttagagtgagggctctggagtccgttgcacttggatttgaacgccagttctgctattcataaatctgtgatccagggcaaattgtacccatcattggtaaattaggttaatcgtgcctacctcccagaattgtagggattcactgaaagagtaaatgcacacggtcagtgatcagtagaacacagctgcttttatcctcctcatttttgccatcaaaccatcattcctaagactgtgttttcccacttgaaggttgctggggagttccttgtactgtgtttgggcctgcagtgcctgcctaaaccatttctgatgaagctacacctttgggtaccatgctttgtcccacctgcccatctcaggcagagacggtctctgcctcccaggcattccagactgttcctggccttggctcctggtctccctctgagggctgtcatgctgcagccagtcccagcgagtgccaagctttagcccagacaccagagagtgagaactctggtgagaggctcgtggcaggaaggaggaggcttgtgggaagaggtggaaagggtagggttgggggtggagagtgcaggtgaggagcgggaattaaatccagcttttgactctgtaaaaatttctccaggaggagtagtctttcaaaggatggttcccagagtgacagcctgggctaattgcctggagaaataaacgagaggacaggcaatgaataaaagccagctctcagcaggagtctgtgtatcacatccttccttttcacatttcatgttcatatttaaagctcccatccaaagacccataaaacaacagtctctaccggtaatgatttcctggaggccccctggaaagcattagaaaagatgtttccttttaataggcttttcggggaagagaaaatcaataatttctagggagatgctttacagatgcaaatttatattatccaaatactcctggttactaccctatttcctctaagaaatggctgcatgttaatgttgtctctggtaaagacagacaatgacttgcagttctcaatatggatacaatgaaagacatgctcaaggtagtagataccttgcagagccttcttacgtggtcttagttacctctagctgcttttggctattgcaaataaatttcttcacgtgatttacataatggaatatttaatagaattattctttttaagaccctgacaaattaaaccagtacctaatgcagatagctctacatttaatagaggcttgactaatgggtctgtaataaagatacactatattataaggacctgggaattgaggtataatcagaagatgagttttctaagaacactgcttttcaatcaagttgtaagttgctttgaaaaatcaaattcattagtggccagccatggttctacaatctgcagatgtggttttctcttttctccatctttgcatattttattctaatgatcctccatctgttctttcttctgagaaatgggctaaatttcagaaaatacaaatcagagatgaatgtaaaacaaaggtgtctctcatattttaacacaccccgtctctccatgctatcccacagcgcagcccccaccatgcttcacaccatcagtctctgttccctctacttggagaagaccttgtccattccaaagtgaagtgaaaaaagaaatgtaggaggggaaacctggacattccatggacgcgactgggggtggttcaaaagagctccttacccagagtgatgggcttgacattttgtccttactgttgtccactgaaaggttaaataacaggtagtataacttacataattttaaagttctttttattttgagccaaggtggagtactaacagcccaggaaatacggactcagcacaaactaagaatgtgtcccagagtgacctatacaagacatagtatttttttaattttaattttttttttataacatggggtctctgttgctcaggttggagtgcactgatgcaattacagctcactgcagcctcagcctcctaggctcaagcaatcctctcatctcagcctcctgagtagctagggctacaggtgtgcaccaccatgcctggctatatatatatatatatatatatatatatattttattttttttggtaaatttttttgtagagatgagggtctcactttgctgcccaggctggtctccaactcctggcctcaagcaatccccctgctttggcctctcaaagtgttgggattagaggcatgaaccactgtgtctagccataagacgtggtctttatacgttttgttcatagaaaatggaagaatgggggtagtgaagtaaaggtgatatttttataattctgattggtgcacagtgacgttagatataagacaaaacaaatacatggtcagcacatataggttaatgagcatgtagatgtgttagggtctagagagggatgattgattttatcttgcctttatgttctaatgaacaaaattataatcagtatctgtcgataaaatatttgacaaactcttgctttgcagatgagagttcagatttaatttataggcctagtttttattacccatatgtctcacctatagtcatcttgggtcactttattttatttatttaacattttattctaattttccttttcttgacactgttgctaatctgtggatgactttgggcaggtcctttatcccctacattagttatctctctgtattagttatctactgctgtgtggcaaattacctccaaatttagcagcttaaaacaataaaggcttattatctcagattctttctttttatttcctttttaacaaataggatttgcaccaggatcacataatttctaagggttaggaatctggaagctgctttgctgggcggtttcagctcagggtctgtccttgctcttcccactggcctgcttacaattcccatcaccagccactacctttaataagggcactgacactaccagaaaataaaatacttttggaagagacatttggaagaagaaaagttaatgcaatgtacgattgtcagctcctagcgctcccctccaaaccagctgaacatgttttggctccttcgcacaggtgagaggccacgtggcaaatgcaaagtgcctagagtgtaaagtagcagaaggctgccttaaaaccccagcttccccacgtacactgtgagcctggccaagttccctgagatctctgaacctcagttcctcgttcgttacatgacggaaatcgtgttgacctcatagggtttactgtgagaattgaatgaggtaattcctttatatgtatatgtaagtattttattttatattcaaggggtacatgtgcatttttgttacaagggtatattgcttgatgctcaggtttgggcttcagttgatccccaaacggtgaagacagtacccaataggaagtttttcaatgcttgtttcccttcctctctcctcccttttggagtccccagtgtctattgttcctgtgaacgagataaattttctttttttctttttaatacaggctcttgctctgtcactcaggctggagtacggtagcactgtcgtagctcactgcagccttgaactcctgaactaaagcaactctctcgtgccagcctcccaaagtgctaggattacaggtatgagccaccacacccagctagttttaatttttttttttttttttgtagagacggggtttcactacgttgcccaggttggtctggaactccaggactcactcaatcttctagcctcggcctcccaaggtgctgggattacaggcgtgagccaccgtgcctactcgaatgaggtaattcttgacaaaataaatgtgtggctagtacatcttaacatgcttttcttgctgtacttgtctctgtagcaagtgctggctgtgcattagctttcttgtccccttcacccctttggtagtggagcctggagagaatttacttgggaactcaagtgtgccagcaaaggagacacaattgatgagggtactaagcacactgtttgggtgatgatgtttttcaaaacaatatcattagatcttcacatacagagctgggagataacatagtccctatgacagatgttagactaggaccccaaatgacctcgtatggtgtgccagtgtcttcttcatttgctccaaggacacagcatgaatagaataggctttgccatcagcaagggccctctcctagtttttccctagcatttcagatgcttggcacctgtaaccggattttccctgcactgagagtcagtgtgtcttgatgaaatgagcactggtttggagtcagaagacctgggctggtatcatgcccctgcagcttagttgacatgtgtttggatgagtcacttctctgaacatatctttatcatctataaaataggcatcctaataatatttcctaaacacttattctgacaaggttttatgaggaccagaagaaataaggaaaggcaaagctttgtaaatcggagatgcctcaccagcactatcattcctgtgacttccgatcaccaaggagaagggaccagcttttagcacacagagcctgggatggtagaatgccagacatttcacagtccattgggggtgatctatggcagatggtgttcctagcacctttttcaaattggctttactgatctaatcacattatggaggcagccacttgctcagccagaaaggcaacattaatactcaagacaatgctgactcagttacaggcttaagcatgcttagcaattatagctgttacttattgagtctttcaaaggtggcatacatggtgccaagcacttgacatgcattatttcatagccaggactgccatgtgaacaatttcagtgtgtatgaatgttctctggagttgtgcagtgcccagtatgcttgactgttcatggaagtcctgctcacagaaaccctatgaggtatatttgcatgggcttgttgaggaatcttggttatctaatttatggaagagaaaataggagatttggagtaattaacattttcatagccataataccaatgggtagtagagtcagaattctaaagcctctgcttttattactatgctatgtattatttcatgggtttaatgaaattggcaatgtctttgagccaaagaccacgaggagcacacctgtagttgaacaagttgggcttattactcctcgcagtgaggaagaacacataccacaaataatttgtctaagatttgtgcttgggttaggtgatcttggggaaggcttatggaagcagagctttgctctggatttgatgctgctaggaagcagagactgggtattttaataacttcactaggcagggcagactgctaaacagctaaagctattaatggcaaagaagcaatagtcatatattaactaggagaaggggatgtttggcattttgtgtcttggacaatgtccgttaactgttcaaacatgattatgagggattttgtttttgtcttgatccattgtggttgcagagtggacttgtctgatgttcatgttctaagaaatcgtgcgtttgaaaggagaacgctaatggctagctgtatcaggctagcccctgatggttttctatctctcaggataaaaggactggagggcactggggtatacacctgttaagtgcgttcagctgtgtagctcaaaagtgatgctcaccgttctgtgataaaagaggcaatagaatatgcagatgccatgtggagtcatcacattttactaaataagaaacactaaatgagaatcagaaatagctggttgtaggaattttaaaaataggttttgttttgttttgttttgagacagagtctcactctattgccgaggctggagtgcaatggcgtggtcttggctcactgcaacctctgcctgccaggttcaagcaatgctcctgcctcagcctcccgagtagctgggactacaggcatgtgctacgacatctggctaatttttgtatttttagtagagatggggtttcaccatgttggccaggctgattttaaactcctgaccttgtgatccgcccacctcccaaagtgctgggattacaggcgtgagccaccacgcccagctaaaaaatagttttttttacagcttagtataactcatactttttctcacagcacaattgtctggtccagacggcagttcctatgttaaggtgctatttaaccgtttttgaatgattcaagtcagccttgatgagtgaagatagtataatatggtggtaaacatatatgtttggcaatgaaagacatgggattgagatccatccatgacataaggagcttctgcggatgaagaaaatgtatgggaattctgtagcaacttgaggttagaaggtcaagcatctatgacacatccatacagagaggttgatggaacgagaactgttaagatgcacattcttgtgatgcataaggagagacataatgatttttacagcacaatcatcatgaaagataaaatataagttgaagaaatggaagccatctgagcaaggagctaccctattgcggcagggattggggatgagatagtgagaaattcagcttttagtttatttttagagatgatgtgcccaataaaccatgggcttaatttatctgtggcttcaagatagtttgtcttagggaagtgaaggcaggtgaacatcagccataaaataaattaagtgaattaaataaagttcccaagtgcttctaaatgtggcagccagacaggaacatatttagctagggccacactctaaaacagttgtctggtctgcccactcgaaacaccaaatccttactgcaattgtcagcagtcaccttgatctaaaatataacaatagttagttttttttaacttagaactttagaaatatgacaaaagatttcatagaataagttaaacaaaaggtagttcacagactgggagaagacgtttgcgatgtttaaaactgacaaagcattagtatacggaatataaaaattctagacaattcagcaaaaaaggcacagaaacttctataaaaatggacagttgaagaccaggaatttcaaagaagaacaaatattaatttgctaacaagtgtagaaagaaagatctacctcctttgtaatcattttatagcaaattgaaatggtaagatactattcaacatatataagtcaggcaaaaatggacaaattgcacaatacaaagagtggataaggatgtagggaaacaggaatcacttctggttggaatggataagtgtatccattagtaggaattgatacagtcatttacaagatgcttggggcaggacttactgaacgtaagttaatatataatttaagattcagaaatcccacttctgggtatttgccacggagaaactcacaggtttctatatgtgaatccatataagactgtttatgtaggtgggacaacctaatcatccatcactagcgatatggtttgactctgtgtccctaatgacaccttaaattgtactaatccccatgtgtcaagggagggacctggtgggaggtaattgaatcacgggagtggatttttcccatgctgttcttacggtagtgactaagtctcatgagatctgatggctttataaagggcagttcccctacacaagctctgtcttgcctgctgccatgtaagacaggactttgctcctccttcattttccaccatgatggtgaggactccccacccatgcggaagttcattgaacctctttcctttataaactacccagtcttgggtgtgtttttattagaagaatgagaacagattaatacaactagtgggatggataagtgaaaagaggataatgcattccgtggaatgctatgcagtaatattataatgtgtatatatgcatctatcatgtaataatatatacagctacatagagaaatgttaatagcacagtacatagtgaaaaaagaagacaaaaagaaatagtaaaaagcagcagaagaaacaaggcataagaacctttattcaaattgaacacacatgtacttacaaaactatttttacactgatgcatatttaagaagtatcaaattcattagagtgggtgtctataggagagaaggagggtgatgagagcaggggtggggatgaaaaagaaaagtaaaatgcaataagacaagggcctagtgtaaatcagtaggtaagtcaagtgtctactctgaggtccctcattcctcagtaaaaggtggccaaagttgctcactgaaaatgagtacttttgcaatatgaacaagttcccacattccatttattccattgtcaccattagtatgggtcaatattcaacaaacaacataaatgaatatataacaagcagaataacttatctttaggtcattagctaagatgcttcatcaggtctgactcgggccttattggaccacttgtctccacctttgttgtctatgttctgctgatttctcctctgtgttcttgtgttagatctattctgaacttaggatggttgtagagaatactaaatgtctggtctgaaatttctcacagttcaatcgtgatatagtgtctgtattccctcaatttcaaaagagactttcttcttccagtatgctctacagaatgtctgacactagttacttaccacatgataggaaaaggatctgtttttcccagcacttgggggttcccagttaacagtgaacagctgaagctatgggaaggttgagctctacatttttctaggaagagtggcatctagatgggattgaatgaatggctccccattcatgtaaacttattttctacttcattttattccttgtgattattctaaaatactgcttctgactatagcattttgagattttactatttaacatatcttgcttattatcactgaagttattcctgcatattccacctcttgtaaattgtaaaagattcttgtcttctaggtctttcagccacctgcagagaagaggattagttagaaagcctaggcttttttggatttgatttttagtttaccaacacaaccttttagcataggtaagcataagtagggtagtttagtaggaagaacactaattttgtgatcgtaggttaatgaaaatctcccagagtacagtttacttattaataaaattataaagtaacatgtggaggaattgagtgaggtaatatgaaccatagctgttacacagtaggctctggataaataatagttctgttagggaccaaaaccatatatgattttctataatattactaaatcagatccatctgtagagtgatgcatttcttgacaacatacagaaaatacaatacctgagtcattttttctcacccactctgctgatgcatttctttatgtgattgtctttctcagctctgaggaggagaaggcctatcattaccgcgggcggtggtgatttgttgctgcctcaagaaacagcagcactttttcccccccctcaaattgtcaagtacatcaaactttaataactttacttcccaggagaagtttcttagctgtggtgaatgggttcacctgctggtaatctctcttatttcttcaactcctagggtggtttttcttacttgcaatgaggataggttgacacttgccctccaggaatgactttcaagactccgccataggattaacccgccatgatctggaatggacagcagcaaatacatcaataatataatgactaagcaaaaacaaccactgttctcttagtgaagggatggatggcaggattttaatttcacttatcaagaggccattcatcttgataacctcagctagtagataaaaaagggtataacttgcaacatgaaaataattctcccatttccctcctgttcttgtattctccttttttttagagtttattttcttaagaggagatttaagttcatggcaacatagagtggaaggtgcagaaagtttccatatatcccttttcccacccatagacaggatcccccattatcaacatcctccaccagagttgtgcatttgatgaaccttccttcacacatcgtcacccaaagtccctagtttatattggatttcatttgtgatgttggacattctatgggtttggagaaatgtgtatctctctacaattatactatcaagcaaagtagtttaattgccttaaaaatcctctgctccacctccctcttcactgacccttgatcttcattcctccctccccactgaccccgacctttttgccgtctccatagttttgccttttccagaatgtcatatagttggaatcatacggtatgtagttttttcagattgacttctttcacttagtagtatgcatttaacattccttcatgtcgttgcatggcttgatagctaatctccttttagccctgaatattctattgtctgggtgtaccacattttattattcacatactgaaggacattacaattgattccaaattttggcagtgataaaaaagctgctataaatgtgtgcaggcttttgtgtggacttaagtttttaactccgttgggaaaataccaaggagcacaatttctggatcctatggtaagaatacatttggtttctgtaagaaaagctcctgtcttccaaggtagctgtaccactttgcattctcacaagtaatgaatgagagttcctgttgctctatatctttgtcagcatctgatgttttcagtgttctgtttcgtggccattctactagacaaatagatgcgtagtggtatctgattgttttaattctcatttgcctaataacatatgatgtggagcatattttcatatgtgctatggtctaaatgcttgtggcccccccaggattcaaatgctgaaacctaatcatcaagttggtaagattaggaggttgggcctttgggaaggtgattaggtcatgagagtggagtcctcatgaatgaaattagtacccttataaaataggccccagggagcttgtttgccccttccaccatgtgaagacataacaagaaggcaccgtctatgaaccagaaagcagccctcaccaggtattgaatctgccagcatcttaatcttggacttcctagcctccagaattgtaagaaaaaatttctgtttataagccatgcagtccaagatattttgttatagcaacacaaatagtctgagacaatatgcttatgtgctatttttatatgttttttggtgaggtgtcttgtattttaaaaatatctcatcctgcctttttttcttattaaatttgaaatctttgttatatacaaggaatacagaatgccacatagaagttcatgattcatagtggcctgcctagagccacgtctttggggacaagcccctctcctaatttggtgaccacctcctccaagtggaaactcaccagcctcccacagcctcaaccctagtacagatcccatgttaaaaatataaaacacctctgaaatgggaaacaaggatttacaggtaaaggtatgttatttcttcacaggcacacaatatgatgttaatggcctgcttccttgttcaggttgttgttaactccagtttgcatcccctcagcacgtgggtcaagaaatggtgcagtgttagggatgggggacagctagtaagaagcatagttgacagtgaattaacccgtattgagaccaaaggaatattatagaaaatccagagaggagaaaacccacaggcagataatttgcacaccaactctttaggaaattcatagattgttattcttaggcagggttctcagaatttataagttccttaataaacccatcccccagcttcctgagaagagactttaggttttatccagcttctgaaacttgctgaccatggacaaatacaggaatttatgcaagctggtagtgttaagtttttaatatacagatcgtagtcattaagtgctgttagaagaagatgaatatgcaatttagagagaaacttgcatctaattaccagcttaattaatacggggggactgcagcagtaaaaaaattatttcttcttcaatttgctaacgtgtattgttgcttcctcctctccaggctcagggacctgggcttcaagggtaagcagatgatgatgagcaggcaggctgatcctgagcaggcagtgaggtgggtgtcactgtcacatgggggttatgccactgtgcattcatggagtccaggctttccctccctcctggataactgcctctgtttctccccttttatcgttcatgggcctgacatttctcttttgtgtgcttctcaatgtgattctattttgaggtttctggatttacttcccttcttccttttttttttttttttttttttaatttccataggttattaggaaacaggtggtgtttggttacacgagtaagttctttagtggtgatttgtgagattttggtgcacttatcacctgagcagtatacactgtacccaatttgtagccttttattcctcaccccctcccaccctttccaagtccctagtccattgtatcattcttaagcctttgcatcctcatagcttagcttccacttaggagtgaagcaaacatagggtgtttggttttctattcctgaattacttcacttagaatactggcctccaattccatccagggtgctgtgagcatcattatttcattcctttttatggctgaatagtatttcatggtatatatataccacaatttctgtatccactcattgattgatcggcatttgagctggttccatatttttgcaattgtgaattgtgctgctatacacagtgtgtgcaagtatcttttttgtatagtgacttctttttctctgggtagatactcagtagcggaatcactggataaaatggtggttctacttttagttctttaaggaatctccacactgttttccgtagtggttgtactagtttacattcccacctgtcgtgtaaaagtgttccctttttaccacattcctatttttgattttttgattatggccattcttgcaggagtaaggtggtatcacattgtggttttgatttgcatttctctgatcattagtgatgttgagcatttttgcatacatttgttggccagttggatatcttcttttgagaattgactattcatgtccttagcccatttctcaatgggattgtttgttttttacttgctaatttgtttgagttccctgtagattctggatattagttctttatcagatatataaattgtgaagattttctcccattctgtgggttgtctgtttactctgccgattgtttcttttgctgtgcagaaactttttagtttaagtcccacctattaatgtttttgttgcatttgcttttgggttcttggtcatgaagtctttgcctaagctaatatctagaaacatttttctgatgttaccttctaggatttttatggtttcaggtcttagatttaagcccttgatccatcttgagtttatttttgaataaggtgagagattaggatccagtttcattattctaccagtagcttgccaattatcccagcaacatttgttgaacagggtgtcctttaccctctttgtttttgcttgctttgtcaaagatcggttggctgtaagtatttggctttatttctgagttctcaattctgttccattggtctatgtgtctatttttataccagtactgtactgttttggtgactatggctttatagtataatttgaagtcaggtaatgtgatgcattcagatttgttctttttgcttagtcttgctttggctatgtgggctcttttatgtttccatatgaattttaggattgtcttttctagttttgtgaagaatgatggtggtattttgatgggaattgcattgaatttgtagattgcttttggcagtatggccattttcacaatattgattctactcatccatgaacatgggatgtgtttccatttgtttgtgtcatccatgatttctttcagcagtgttttgtagtgttccttgtagatgtcttttacctctttggttaggtatattcctaaatatttaattgttttgctgctattgtaaaaaggggttgagttcttgatttgattctcagcttggtcgctgttggtatacagcagaactactgatatgtgtacattaattttgtatcctagaaatttgatgaattcatttatcagttctgggagtttctcagaggagtctttggggttttctaggtgtacaatcatatcatcagcaaacagtgacagtttgacttcctgttatttcttgagtcctgtgtctctctgctccctgtgtgtccaccctggtgctgtgaccatcagctccagatcctagcctgatgagatgttcaagggactttgaggttccttgtagataaggagatgtcagcacatgactgccactgaaaacttgcacatgatttgcagatgagagcatgctccagtaggaatggccttgagccagttgcaagtaggggatggccacctctgtgcataatggtgctctcttttggcctcttgcaatcttaaactttctcactgtgattccccattacacttctgaacctttcctaattcctcttcctcacctgtcatgtttcctattagtttaggatcctgttaactgatcgaactgaaagtccacatgttacccattcctcatggctaagcttaggattcaatagttcaatgaaatcttttctgaccaccacagagcttagtgattttatctttttctggctgtagagtccttagtcaatgcaatttctttgatccctgatgacacttcacaagtatatctgtcatctctactctgtgccaggcactgttgaaggccctaagaatacacaggtagataaaattggataaacttgcaagctggccaagagagacagccaataaaacagaagaaagataatgtcacattataataaatgctattgcaaataaaactgaggataggacagattgtagaggaactcccttagaatgatagatatcagaagaggtgactgttgagctgagatctgaaaggcaaaaaggatccagctatggaaagactttagggtggaggaaacaaccgcaaagatcctgtggttgaaatgaccctgttgtagccaaggataggagagaattcctgtgtagccatgcttggagctcagcaaaggcaggcacacagacatgcagtgaggctagagggttgagcaggaaccagactatgcagcaccttgtatgccagggtgaatactctggagggcttaaagcagagaataaattgacctaatttgtagttttagaagaccacctgtttgctgtgtaaagactggactgtctagggacaagagtggaagtgggagcaccagctttgaggcaactgtagcacatggtccaagcaaatgatgcaagtagcttggacggagaaaaagggatgaactccaacaatattttagagacagagagaaatgagacaatttgatgacaggttggacgtggagaataagggaagacgccatcaggtatgattctgtggtgtagagcttgaggatattggtgaactgaggagagtcaggagttctacttggccactgtggtggacattggtcattcttcttagccactgagcataactgagcatccttcctatgtttggggatttccctactttaggaatctgtttctctaagatataagtcagaatcctgctttaccagtggcccccagagctgggttgcagcttgtgaccctggctcaatcagacacacatgtgaagctccaagttggcatccattctggccatggagtcagcagcctcatcagttttcagaggcagcaaatgcagagattttaggcataccatctgagtccagtgtctacccagcaatggtagtactagtatctccctccagcagttccacattgtgatatggggattgtccctggctgttggcccttaaatctgagtctcttgtcctcctaggaatcttgccagctatctaataccctacaaataccatatctgcataaatgatcaggataggactttgcttgttttcgacaagaacctcaaatagttctgccatgtcgagaagaaaagtattagacatgtaaggagagacataacctggcaatggaaatgacaaatctgttgtttagtggacaggtcataggtggggttatatatctgagagacactggcatagagtggtatttaagtcatactgagagcactgaaggagagaattctcagagaagtggacctaccctggggccgtactatacaaggagctccaacaggaaagctaaagccaatgaaaggactgagagaaagctacggtgacacagaagggctgtctgtagcatgagttctcaggaaagccaagtgaaattatttcaggaaggagtgaatggagttgtgtcaaattcaaccaagaagcactgactggcattgctgattagatttttaggcatagcattaacaatttcttaggcaataagttagaatatgggtttggtgttagtcagacctaggtatgagttacagctttataatttacaaaccatgcaattttgatcaggttccttagtccctttaagactgagtgtttgcgtttaaaaatgaaataacaccctccacaaaaattaatgatcttaaaatcatggattgaattatataccccccaaaagatattttaatgtcctaacctccagtacttgcaatctgaaaataggtctttgcacatttaattgagtgtaaatgaggtcattaggttgggccttaattcaattttgactgatgtccttatcagaagagggtaatttggacacagacacacaaggagaatgccatgtgaagacacagagatgcacagacacagacaagatgaccatgtgaagatgggggcaaagatgagagtgatggagccacaagccaaggaatgcctggggccaccagaagctgggagaggcaaggaagggtcctctcctcaaagcttcagagggagcatgggcctgccaacaccttgagtaatttggacttctaggtttcagaactgtgagagaataaattactcttgttttcagccacccaatttgtagtacttttcttaggcagcccgaggaaactaatacagattttggtaccaggaagtgtggtggtgttataacaaaaacccaaaaatgtgaaagtggctttggaattgggtaatggttatagattggaataattttgaaatagttcatagcaaaaacctagattgccttgaagaattgatggtagatacatggacattaaaagcaatttttttgtgggctcagaacaaagagaagaaagttgtagagaaggcttctattgcccaagagaatatgtgtactgtcacgaacagaacattgctagaaattgaaatactgaaggaccttctggtgaggtctcaggtggaaatcagcattattgaacactggaggaaaggttaaaaatcggtggaaaacttgtctgaattatgttctgtcattgggtggaaagtagaacttgcaagtgatgaacttggatattgagctgaggagatttccatgcaataggatattcatatcctgttggttctcaaagagccctgattggtaaagcattaaatgagattaaatgaaacaatgcatgtaacacagagcatggtttctgcacagactaagagctcaacaaataataaagtgaaggttaagggtgtggtctccaactttccagaaaggctgtggacaaattgaactgcaacttgcactctcagaaacaaaacaaacaaaaaatgcaaaacaaaacaaaccaaaaatacaaaacaaaacaaaaattgctgtaacatctattaatcattcttgtcaagatcacagaaatttttcttcctattggtcaatggtggaaaaatataaatctgaaatgtgattagaaacttaacagctctgagatattttaccttattttatgtttctgaggcaatatcaaagcccttaggataaaaagcctatttagacaattaggctcctggtttgttttttccctgcaaataattttgttatttaatgccatactggagtaaattagtcttttctaagtattttatagctcataatactgataaaatctggatattaaggtacatttccagggatatctgctatcataaatgtatttagtgttccctgaagttcaagccaattcagtaacccaagtaacagaaatgagaactttacaatttttgggggaagagataaaaatattacttgcaggtgatacaattacccttttagatctagtataatcctattaaaatgccaaaggtaatttgcaaagactgagaaaacctaacatgtagttttcaaggtcatctcatagactagacagatgagaaaatacaaataatgtgtgcgtgtgtacagtgtgccttatcagatattaaaatgtattatgagaccatagtacattaaaataatgtgatacattaaaataacataacgtgataaggatagggagaaacagctttaacaaaataaggtcaagcaatagatcttagtgcacatcacattaagtatatcataaaagtagaattacaaatcagtagagaaaggaatgttgcgttcattccaattaacatttttaagcaactttcttgtgtctgacactggaagatataactaagaatatgataagtcctataatctcaaaaagcttagtctttatgggagacagataaataaagataaacttagaaaatgtaagtcacctgagctatggcatcattgcagggaaggcacaaacttgatgcagcctcaagagttaagttcagtttctttgcgggagttatgtctgagttggattctgaagggcaagtaggaggtaagcaggggaagggattctgaagggcattttgaaataagcagaaggcgtgaaggcctgaggtccgggaagggcacagcacatttgcggagccagaagtgctcaatctggtccttgtcagttggggaaggttgtgaatgcaggctgggagacacaggtaatacaaaagttaaggagatcttaacttttgcttgctaaagagatcttaaagaagacccagagccctattagacatagtaaaaaccactggaaaatgtgaagatgacttctaggattccgacttgggccactggagaatggtgagaggtatgtttgcagagccagtaggaggtgatgaattaacttgtgtacacgttaagcatgtaatgaatatttgtgtcttttatccaataagcatcgctggctaactagttgaatttattgaaggcttataagaaatacaaaaatggaatcctcatggattagaaacaaaacttaaaaaaaaccctagaaaatataaaacatgcattgataatatttcttagttttgggtgataacctattaaggtacctttatattttcctttatatatttgccaaattttctagagaacatgtagcacttacacttttagggaaaacctaagtcatgaaaaaccttgcttgcagtttcctattaataacaacacgctgaaatctgaaggatagtatctgaatatagtgacatgctcttaagtgcctgcaaagataataggggataggcttaatattgggaactagaagcctggatttttaggagacagattcactcatagattgtctaaatacatattgtgtggacactctctagacactggtgatgtggcagagccaaacctccaaagtccctgctctgtggggcttacgtacaatatcagaggcacattctagcagcagagttggacatgggttgcactgctgggcaagctgaaatctcggagctggcagggaactcagaagtctattttattttacagatgaggaaacaaagactccagttgaggggcttctcccccatgtcattaattgtcacaagggcaggaccggaattcaggtttcctatttcctgaaataggattgcctcataaatatattgcttcatcaattcatgtcttagcatttactaagagagcaaagagtattcacagaatgaggtttgtgtgtcacagaagggcccctgtggtcctggctttgcagtaaacggtcatacaagaatgtatcctggctgggtgtggtggctcacacctgtaatcccagcacttgggaggcaggggcagggtgtgggaaccacttgagcccagatattcaagaccatcctgggcaacatgtttgagaccttgtttctgttaaaaaaataaataaataaatacaaaacttagccaggcatggaggtgcacctgcagtcccagctatacttgggaggctgaggtgagaggatggcttgagcctgggagcttgaggctgcagtgagctataattgaaccagcacactccagcatgggcaacagtgagaccctgtatttttttgttataaaaaatacattcttgctattagaagatgctgttcattttcattcattcagcaaacacttaccaagattcttctatgtacaaggccccatgttgagaatacaactgtgattaagacaaactgttcctgttcttttggagtttacattttgtcgggggagagataataaaaaaactaattgcaggggctttcattttttttaggtaggaaagttctataaagtcacctggaacactaaattagcaaacacggcgccattgctcttagggggaaacacagagttaggttcctgtgagcctctggtcacgacatttttgtcagctaatcaatatataaccttgttttatgtgtgtttctgtttaaagacgtcttatttaatatagttgattcattaacatgaactcagggctaacagcatatcactcatgcctgaatgaaatttacctattttctctgtaaggcacatcccagcctttttgcacttagaaacactagacagcactttaatgcttggggaccatttttaaacaatgaaatcgtcaaaaaagacacaaaaatgtgaaaaatgtggcagtaactagatcacaaaaagaatatttacagtatgagagtagaaacaagaaggcagaatgccaccatgttggacctcagctggtccgacatgtgcatcagacaactcaaaatttcttctactttgtgcgtgtcaatgaatgaccatgaaagcatcataagtattgatttggaggttactaaactaaattttagtgagtgggcaaatttgcagacatgaaatccttgaattaaggcactaacctgcatcagacattgactgtatgttattaactgtttctataccattgcaattgtgctgataattacggtgatgcaatatcctttcacagggagtctggaggtcagagaagattttctgagaaacagacactaaagctgaaatcttaagggcaaattggtgtcagttgggttgagtggggaatgatgacagtctatttcaggcagagcaaacagcatatgcaaaggtctgagatgggaatgagcattgcatatttctagggcctgaatgaagtcccttatagctgaactacccagacccatggggagggaggagccagattatgcaggaacttgtgactccagtaaaggattaaagaaattgagacagggttttactccatcacccaggctagagtgtagtggcccaatcatgtctcactgcagcttccacctccccagctcagttgatcctcacattttggcctcccaagtagctgggactgcaggcatgtgtcaccatgcctacctaatttttgtattttttgtagagatgggtttttgtaatgttgcccaggctggtcttgaattcctaggctcaagtgacacacctgccttgtcctcctataggctgggacagtaaaagattttgatctttattctaagagtaatgggaagccaggctaagagatagtatatatttgtgttttaaaagggtcattccctctgtttgagtgtaaagaaaggtctagatggggctgagaggatgtggggagggcagttggaagattatttcaatcactgagcagagacagtactaaggttaggctaagggcagggtgcgagggaaaagcggcattaggatcagagttgggtttctggtgtgtgcaactgcatagatgagggtgctatttccagaggtcaggaacagttggaagaaagtgagttttgagggaattagctcaattttgttttgtagttaaagtgcctatgagatattgtggtaggtgaagaaatgtgccaccgagttcccccttcagggaaggacttgctatccagcccagcggaaggcaggctgcagatagccatcagcagtcagcaacttcagggtctgccggaggggcagagctgcctccctagagggcgtgcccctcttggagcagctcacgtctggtgaatgagtaaggcgggacactcggtgggcaatattggctccagagctccttgcttagggtccaaggggaaactgtaggacgttcaacttcttccttggacaggttcatataggaaacaccttattactcacatttcaggtcagtgtgtgctctgcaggctctggcctgcatcagatagccaagtggagaccaaatcggacacatggatgtgatctaaagatgcatgttcacaaatggtcaatatgcaggtggcgaatgaagatatgagagtggctgattttgtgtagaagaaagaatgaaaaggagaagtagcctaggaatcaatcttgggaaactccaacctttgaatgtgaaacagggaaggataaactaaaagactgttcagaaaggtgggaggatacccaggaggagaccatgaaagacaaaaaagaaaatagttaactccacagagtgctgctgagaggctacggaggcccaggtcaaaagtataccttgcagaagtcattggcaacttagctcagtggttgggtgggctgttgaggggagatgcaaggtttcagtgggttgtggaatgagtgagaaattaagaaatagagacagtgagtgtagacaactccttttagaaatgcgactgagaaaaggacagaagacatagggctgtaattgaaagaaaaaataaggcttgagatattaaaaaaattacactttttttaatttaaatttaagtttttttatttttaattattgcgggtacatagtaggtgtatagctttatggggtacatgcgatgttttgatacaggcatgtagtgtgtaatcacatcatgtagaatggggtatcccttccctgaagcatttatcccttgtgttacaaacaatccaattatactcttttagttattaaaaaatgtacagttaaggtattgattatagtcatcttgtgctatcaaatagtaggtcttattcattctaattttttttgtatgaattaagtatgtttgaatgaccatgggggaaccaagcaaagatggtgagttagaagacacagaagagagaagagattattgataggagatgattctcgaagtgggctacagaacacagacagagagattggaccgaaactaggaagaagggagttggctttcacaggaattgaggagaggagagaagatacagataggttgtaggtttgaaagtaggtgctggaaagttgagggctcctctctggcagcttcaaatttctctgtgaggttggaagtgaggtcatcttttgtgactgagggagctttttggggtggtggtgaggcaggagaataggatctggaggcagagaacctaaggctgattcatgttgacttcctataattaaaccaaaaggaaaaccccaactttccatgcccaagtaacaagaggaccataggctacaccctttgcaacagccccatccccccttctctgcgtggcaggtgaaaaattgaaagtacctctgattggttccctcctgcaaccaatcagactggtcacaggccaagttttcatttgcctaggagtgtaacttcacttcagcctctaattggtcccctcccacaaccaaccagaatggtcgtgggccaccacatcatttacatagggtgtacaccaagtaacaaatgggaaacctctagagaatatttcaaccccagaaaattctgtaatggggctcttgagctgcttatttgagcccactcccaccctgtggagtgtacttttgtttcaatagatctgtgcttttctttcattcattggtgtgttttgtccgattctttgttcaaaaccccaagaacctggacacccttcatcagtaacaggtttggatgaagagaatggaaaaggtttaatacagtcaccaaggagcatgggaaaattaattgactaaagaaattcagtagtaggaatatagaactatgttgtgaactcggctgaattctgaatgtagacttgttagcccactgaagtgtcttttgggcattttgaatcttaagggcacgagatctaaaatagcaccatttccccacaccattgatgtcttacaggaacacagaaaactgacaagaaaatgctttgccacagaagaagtcaatattctaaacatataaaactatgagttcaagtttcatcctatgatttccctacttcttaatcttcagatatttctgtgttaagttcttaatataaatgttatttgtcaagcaatttgcagcatataaaaatgttgacattaacttttctcatctaatcctctaacatccttctaaggtggatgatattatttgccacttaacaggtgtttgcaaagttatgggcatgatccaaggtcaaactattggtaaaagtcaggacaaggacatgtgctccggtcttctccattcaaagtctgtgatctttcactggctcatgttcctggatctcagaaatgtactagatttgggctcgtttgtgctgatgagtttaattagtgaaggataaataatttcttttctggtttgtttcatttaatatttccccctgagtttgagtttgtgatccattatgataaattcttgttcctttgtattcttagcaatggcaggcttggaatactaaaggaagcaattgacttaaaatagtgaataagcccactttccatgaagttgttcttgtctgtgctttgcctgagttatggctaccttaatgtggtaactggcaccacttcaacagctgtaatatctcttcaattacagctgcctgaaaattacttaaagtttcaaatgcttggtgcatcaagatagggccatggggaggacagatgagtcatgtgaagcttgtcttttcagggaagagacatttccttaagttccttgtgccactgaagcttcgagaacggttgaggttactctaagagcaacaaagaaagataaatagaaggtcttaaaactggtaacttggagcaaattatatatttttgaaatagatttttaagatactaagttgaagctgataattttgaaacacaataattcattcttttttgaacacacatttattgagcatctgttgtatgccagctaccgtgcttgacattggaagtgaaaagggaaataaggcaccttcctcattatcaaggatatggggtcttctagtgggcaagattgactcatatgcagataatcaaaacatcagtgcacagataggacttagtagccaataagtatctgctccatcatatccctctatgtgcaatcttagaagagtacatgtattaaatgaaaacacttaaaattggtttcttctgggttggaggagaccattattttagagaaatctttagttaaataatatatttcaacatatttaattaaataatatatttcaatcatataagaaaataggacaaatactatatgattccacttacatgaggtacctagaatagtcaaattcagaggcagaaagaatggtggttgcccggggctgctgggagaagaaacaagtagggagttgttatttaatatcatggagtttcagttttacaagatgaaaagggttctcaggatgatgctgatgatggtactacaatgatgtgaatgtacttaatgttgctgaactgtacacttgaaaacagtcaaaataacacactttatgctgtgcatattttaccacaatgaaaataatacaaatgaaatagaaattaataaaagagattaccatgttccaaccatggatatatgtgttttgtcatatattctttagatttctctcattttaaagaaataaaatgctaaaatacagtaaatgcctcccttctctctgcctcacacttttctcctctttttctgtctcgtcagctataggtactatcctaaagtttgggtgcattatttctacgcgtttaaaaatacttttacggctgggcgcaatggctcacgcctgtcatcctagcactttgggaggccgaggtgggcggatcacgagctcaggagatcgagaccattctggctaacacagtgaaaccctgtctctactaaaaatacaaaaaactagccgggcatggtggcaggcgcctgtagtcccaactattcgggaggctgaggcaggagaatggcatgaacccgggaggcggagcttgcagtgagccaagatggtgccacagcactccagcctgggcgacagagccagactctgtctcaaaaaaaaaaaaaaaaaaaaattgcttttactacagtcaatgtcctctttacagagactactagaaacacatctgtagttgcatgcaaactgtggaaaagtctggggtgtcgcaacacaatgatggcagagaggacttagaacaggatttgagcttgcagtaggtgattcttgggagggtttaaggaaacagggttttactctgcattgatgatttcaggaagtagggtaattctgtgattacatatcttaacaaatctcaagcctagagcaacactaaagttgtaattgtttaagaagcaacagtcacgcattagctaggatagatggatatctggtcatttttgtggtacatatttttgttagtgtgcaaatattattatggcatggttgtatttttgttttatcccatgatggtcacagaacggccttgtctgatgttgatgctctttgaagttgtttacagtcaacaggaggatactaaggcctagctgtgtgtgccaggctcctggatatcagtggctatattttctttgttgctacgtacgtacttctttataagcaataaacattattttatgggtcttagtttgaatggattataatatgctgtagctttttttactccatagtgtgagattagcttaggttgataatagaagatctagtccatgtctttttgtttgtttgttttgttttgttttgttttgttttgttttgttttgagacaaagtctcactctgttgcccaggctggagtgcaatggcgtgatctgggctcactgcaacttctgcctcccaggttccagtgattctcatgcttcagcctcctgagtagccaggattacaggtgcgcaccaccacacctggctaatttttgtatttttagtagagatggggtttcaccattttggccaggctggtctcaaactcctgacctcaggtgatccacccacctcagcttcccaaagtgctgggattacaggcatgagtcaatatacccagcctagtccatgtcttttatatgctgttgtgcattcaactgaaggatggttaggttgcttctatgttttcttgttaaaaattgtgctgatacaccttgcatacaaataaaagtttctctataccattttttgcaaagagagcaaccaggtgtcagaaagtagtaaaatgctcaacaacgttgaaagactagacaccagcttgaactggctcccaggggcaaaatctgggacaatctgaggaataaaataataaaaataatggattataatccatagaatagaatacaagttcatgctacttgaaataattgaatattatcaaatactcacatgcattgcaattttaatcaaactgttcctttattgctgtgtttttgtgatatagctaagaaatcatttcttatccaaagaacataaatacattttcctataaaagttttaaagttttgatctttgcatgtagctttctaataaatgtaatttgtttttgcttatgacgtgaggaagggaatctaatatccttttccacatgggtaaccacttgttccagaactatggaatgctttcagtatgttaaacaaaaatttcaaggctctttattctgatttactgatatatttatctcttaattaactgctctattaattatagctattaactgatatatttgtctcttaattagtataaagctttaaattaagacttgatatctggttagtcatctgtcactattcttcttcaatattgttggctctttttggccataatctttgatacacatttaagcctcctgttaagtaaattctgtgaaacatcttactgggattttgatatgaattgcgttgaatttacagatttcaataatcataatatcaaatgtcttcatttttaattatggaatatttctccattccttttagtcttactatattctatccttttcttcataattattttatacatactttttagatacatacccagatatttgtattagctgggaattgcctggctgcctgagagagacctttatttcagtatctttaaaatattagagctcaaccctctaaatagaacccagtgttaggtagttgctggtatctcactgaatccaaatgctaagggtaaggtctctggattttctcttcttctctgtcatggtccccaaatggtttctggaacttctgctgtagtgtctgattccaagaggcttggaaggagggagtacagaaggacaaaaagggattcctatccaacgatgtttgctcacaccgaattagaaaatttaacttccaatagaggctggaaggtagagtttttcagctggatatattgtcactctgaataaaatcggagttcttggctgggtgcggtggctcatgtctataatcccagcactttggaaggctgaggcgggcagatcacttgaggtcaggagctcaagaccagcctggccaacatggtgaaaccccatctctactaaaaaatacaaaaaagctgggcatggtggcctgtacctgtaatcccagctacctgggaggctgaggcaggagaatggctggaacccgagaggcagaggctgcagtgagctgagattgtgccaccacattccagcctgggcaacagaaggggactctgtctccaaaaaaaaaaaaaaaaaaaaaaatcgagttctcttattaagaaagaaaaggaaaagtacatatgggatgtactagcagttgctgctataggttcttttaacttttgttatttaaaatatctttttcagattaaaaatatcttgttgattggtattcatagggatacctatcctatttctattcttaaaacataatttacatgcagaaaaacttacccttcttagtacatttctgtgagttttgagaaacacatggtcattgtttagcttgaggaacacatcagacagagtgagaaacagactattatgaagtctggtcagagaagtaggcaagacctcactattagggggcattataggtgatgttagagaggctggttttagtctaaatgcagtaggaagccactggagagttttaagcaggggagtgatgtgatgtaattgatgttggaaaactcattttgagttttctctggagaatagattgtagaggacgcagggaagaaaagagttcaagcatgaggctcttgaatattccaggcaagagttcacagtcattgaacaagggtggtggcactggagatgccatatactcacagatgcagtgagtatatggcagtcaacaggatttgctcttgaattttcatcttcaatgatttctattacttggatgtgattccctctggaatcagatgttcagaataatcaccgtaatttgtgaatttccttgcttgcatacactctgctaatttggcaaagctgttattttttctcatttcccctcgatgatcccaagtgtgatctacaagctgcgtgatatagttacttttatggataagagaaaagaatgaaaaaatattctatttaataaaagaattttaaacatgctcatataatctggcttttacatgaggatttaaaagtgagttaaaaaaaaaaactactggatggagaacttttctcaggagctttgggaaggtcttgccctcttaaatctcttccataaattgcttaacttccattaacaatattctttaacattttttaatgtagctttcctaagaagaatggcatattaaatcctcaacactgtgttatacatttctttattaattcactttgccttctgaatcatttctgattgcacgtagaagttgatatttctaacaatcagtttcattaactcaagcagagtaaaaagggacagaatctatttgaaataaagagatgaacaaatgcaatgaatagactgcaagaagttctctagtcctgaggccccctggccacctggtctacaaaggttttggtagaactgtaataaaaatgcatatcataaagcagagatagactatgcaaataaatagggaaagaataccaataaaatatgaataaaaaatggaaagccatcacattaataaaaaaagaacgtaactttgaaccataaaagacagcataaatactgtatttgagctataaatttgggtccggacttcctggaaccaatattaaaaaagagtcctagccaattgcccagttcttattataaatatatcaggaatcccagtttgagcctaagaagggtttaatgtagaattgaagtttgtctaggtctacagtgtaccggctgtgtgtctcccaggtacctcctggaaatagacttctaaaagaagtgtcctttaggggcaatgcatttgtgggcaggaatcagacatccatgtgtgtcatgtcacccagtagtcttctgagcaattcctctttttggagccctagtgtgtaaataaacgtgatccagacatgaaatgtcacagtttgaaagtcaagctccatagcagaatttcccaaaatgatatatgttgggacattttcccacaggatgttaatacatattttgaaaaacaaaatgtgtgtgttaaacatatctaaataggagcctttttagcagctgagtcctattaacaatcacatgagcaggcttaaggcagattttagtaactgttacttccaactgcttatgcaaaacagccttgcaaagtctattctctacagtaattctgggtgttcccagagggtttctgaacagttctggagggcttccctgtgatgtctgctggatacagctgcaagtgcttttgatcattactgcttctgggttgcacctctgtctgattctgtttccatcttcacacatggcacagcaatctcttgccggggaatatggtctcttttcaggtcatacattactgttacccttgctagatattgcagtacatccaggaccttacactacactgcttctgcttctgctatttcctactggcgacaaggttttctgcttggagcaactattacttccactatatcctctgggcctgctgtcctgagggaatatgtattacaaatacatattcaccaatgcactagaaattttaataggctaagttggctgcttatcagcgatgaagtggagataaatgacaaccgaaatggtagtacttcaatatcttacataatttggggtgcaacggccctgcattaattggagtgagaggccgttaggtcttaaaggctggcatcttggctccacttcccacatcaaagacgtcagagcactgggcttggtggtttatggcaggctcaggtccttgtccattgtgggctgggtaaacagactcaatctgcaatttcactattttagaggaagggaagaagtagaaagccttgtttaggtctccagttaagctatatgcctcaggactcaccagaaaagctctgcattttgtgtataaattgcttgttcagcggttaaggaagtggtactttgtttgccattggtctattgtcttttgtctattgcccctccccttatagaaaacccgtggaaccagaaacctacatcaaattactagtattaatactaattgctaatattaatactaattactgatattaattactaatattaatgctaattatcaatgtgttataaagaaaaaatgcaaaccaaaatggaataaatacatttttcaaaagtgtgtatttgagaaaactgactgtaacaaactctagtgactcatgttaaacttacattaaacacactaatgtggtttacaggtcaatgtaaaagccaaaaccataaaaatataagaaaatacacgtgaatattttttattaggatggagaagaatgttgtctgccaaaacacagtaaacaaataaaaaaggaaaagatcagtagctttgaccacacttaaaaaaacaacaatccgaggccgggcgcggtggctcacgcctgtaatcgcagcactttgggaggccgaggtgggcagatcagaaggtcaggagatcgagaccatcctggctaacacagtgaaaccccgtctctactaaaaatacaaaaaaattagcgaggcgtgatggtgggctcttgtagtcccagctactcaggaggctgagccaggagaatggcttgaatccggggggcggagcttgcagttagcagatatacagtcactgcactccagcctgggtaacagagtgagactctatctcaaaacaacaacaacaaaaaatcctctttgtaagtcaaaatgtaccagaagcaatattactgaaaggaaggttgaatagtaattgagatcacagactttacataatcttatctgactttttgaaaataagagttgatgaagtcaatgaatcatttagcaatagctttcaaaatataaaagggtaaaaactttttgatctagcaattgcactgttatgaattgattgtgcatatatatttgtaatgtacaaatatgtttattggtgtattatacaatatgctaattgctattgtatgacaacaataacaacaactggaaacaactttctatcaagagcggacttgtgtgatgtattttgttacatccgcacaatgggataggatgcagccactaaaaagaatgaagtagctttatatatatatatatatatatatatatatatatatatatatgtatatatttatttgtatatatttatatatatttatttgtatatatttatatttatttatttatatatatttatatataatatatttatatatatttatatataatatatttatatatttacatatatttatatatttacatatatttatatatttatatattttatatacatattttaatatatgtatatttatatatttgtatatatatttatatattttgtatatatatattgtatatatattatatatttatatatttacatatagtatatatatatttgtatatatttatatatttgtatatatttatagatatattttatatatatttttataaatatatattttatatatatatttatatatggaaagatttccagaactgctaggtgagaaaatgatctatagacgtatgcttgatttttttttttttttgtttaaaagatctacatattagtatttgcagctttttcttttcctgatataatcagagaaaccattgacagaggctacttttggggaatagaactggaatttggtggaaggaagatgtgtaactttctgtttaattttttcatatgtctatgattatttagaaatggaaattttatttactttttgagatggagtcttgctctgtcacccagggtggagtgcagtggtataatcttggctcactgcagcctccgcctcctaggttcagctgattctcctgcctcagcctgctgagtagctgggattacaggcatgtgccaccacacccagccaatatttttagttttagaggagacagggtttcaccatgttggccaggcttgtcttgaactcctgacctcaggtaatctgcctgcctcggcctcccaaaatgctgggattacaggcgtgagccaccgtgtctggccaaaaattttatttattttatagaaaagcatatacttatattttaaaacctcatgctgttactataaatacattttatctgtcaattttaaaaagagagcatataccataatctgacacctctgaggctaatcctgttataaatttgggaaaattactttatttctcagtcttattttactcatttgtaaaatgggaaaaataatgtgtacttcataggattttttgaagattgaatgagataatggcatatagaaacactcaataagtatttgctattattattaatgtaattagaaattatccactggcttttaaactgttcttatttgcattatattgtgtgtcattgctgtgggattaaaatgcaattcttagtttttcatattctactcagagttaatgttgtaccaattcccataaaatatataaacttgcaattgtaaggtctgtttatcccctttgccatgcctttatgctattgttattacaggtattgaatatgtattataaaagcaacaagatgatattatcatcttgctttaaggaatcgtatgtatttttaaaaaacgaacaggaaaatgatcttttttttatcagatatttaaagcctctgatgcgttttattttttggtgaagattcataattccatctgttatttgctttcagactgaagagtgttccttagcatttcttgttgtgcaggtctgctttatggatccttacatatcccacttattgtgtattttcttatattgcagaaatattaatgtgttttattatggagccctgaagcagatcctgcttgggatattatattgtgtcacttggataaattctacataacctcaggagctgactcaacaagctttggtgatagtctatggcagtggaattagtaaaagagaaagaaagaaggcaaagatgattcccagttctattgcttgggcaataagggtgagtgcagtgtcatttaatgagaggagtgacaaaatagccattttaatggggaattggagtgagaggggttgccaagtttagttttgtacatgtgaaagtggcacatccatgtccaggaagtaggtaggtacacaggtctggagcctagaagggaggtctacattagagatgttcaggcctctgtgccatcacagtgggtgataattgaagcagtgagatcacgcagttattcaaagataatgtacaggacaaaaaaaatcagacctatggtaaatcttagcatcagcagtttcaatggagtaaagggggaaaaagcagatttcaatgagatgaagaatgactggaaggagaaaataaaacagtgagtgtagatggctcatttaagaagcctggttgtgaagagagagaaccaaagaggttttaatttacttagtttttcaacatgtatgagacctgagtatattcttcccatgttgatagaagaaaccatagagggagaggtttaaagatatttgatcaaggaccattctccaaaggggggatgagatctggaggacaggaggtggagaaggagatgtgaacattagggaacaggttaactcttgtaacaaaaacaggaagacaagggtaaaaatggatgcaggtgagggcattcttgcctaacagctccaattttctcagtgaagtggaagatgagtactgagagtggaggggatagatgagctgcttagatggtttcatgagaacagataggttttgaaacagccactgtggagactcagagcaagagttaattagggaaatggaaggtcttgtagatggaaaccaggatctcgtaaatctgtagttacaccaacaattccttcttcccactatgaaaatcggaagaagaatctgcctgacatcataaagtgtccctcaatccatatgtgtttgtgacaggatgttcctctctttctccttgtgagttctcagcatccagtgacattctgcagcctcctataaccactgaagtataagcatgaaattttcagccatttgacactaaatctttcctcttgggtcttctcacatcaatggctatatgaatacagcattataaagatctaagcataaacctacctgagagaagaacacctaaatgttagcttcggtgcatgatttaagcaaagtcattgcctgaaagaaaaataattttctactctaggaacagttcccatgagacgtgacagccaaagccctatgagctccccaaaggcttctccctgagactaaaaatgcttcattcagggtatttcatgtgggatatctttagtagccattgatttcttatagaaactatgcatcatgcttccccgttcctttcattcatgtgctcttgacagcctttttgctgaaccttacaagggaaataaatgtatcacagtaggctctgaaaggacatgaatttagagatctacttgagttttatggggaccccaaagcactgtcaggaaaggtctgaacttggagcctattcctagagagcagatgccatcagctggcagatgatcttggggtcaatggatttggctttaggggacaggaaggcagaagagcagagacctacagctgacaagctgactgacgttcataagggatgtcacagaaccaaattagcccacgtgctagtggaggagtagggaaaattgtcctcacttagagaagcaagaggctgtatcagagacaaagccctgctaattggtgaaagtctaagtagatgacaagagcagagcaggggagataccagagtcacttcagtttctttgtgcatttgttcattcattcatgcaggaggtatctgtggagctagccccagaaaagaggcatgccttagaaactggctaggaaaggatgggggattttaaatggagggagtgagaggaatatgatgcaaaagtagaaaactacaaatataacattaagaatggtgaatggtttcatttgctgagaataaaatgattttttttttttgagatggagtctcactctgtcacccaggctggagtgcagtggtgtgatctcagctccctgcaacctctgtctcctgggttcaagcaatgatcctgtctcagtctcccaagtagctgggattacaggtgtgttccaccatgccagcctaatttttgtgtttttagtaaagacagggtttcaccatgttggtcatactggtcttgaactcctgacctcagatgatccacctgcctcagcctcccaaagtgctgggattacaggtatgagccgctgtagctggctaatgaaaagaatttggagagaagtttggattagattgggtagaatcttaaatgctgggataaagtctcccctgctttccatggcattcaacaggagtttttattaggttgatgcaaaggtaattgtggggtttggcattacttttaatgtaatatgaaacaacctgatacaaaggtcaataggaatggacaaggtgcactggaaaggagagactgaagatcaaaagaccagctgggtaagttttggaaagcccacctgacagaggctaaggagtcagggaagccattgtgggactggaggagaggagaacacataagacatcaaggagttataaatacgctgacaggatatggcacaacaacaaataggatgtgattgataagggaggaaagacttgaggttacaaacccgggaatctgtgaggatgctggtaccttgactacccagagagaaaacagtccccagtgattgtcccacgtgtcacctttgtcagagcacttagaactttcttcttccctttctttgttttattttttttttattcactagaaagtatgcttcatgcaactggagaaatatgtcttcatcaatatatccgttcctcctaaatcctcaacaatcagataattggtgctcaataaatatgtgttgaataaatgctgagtggtgcccttttatataaatggaaataaaaatgatgggaataataagtaatctaagagaaaataatttcagaagttacaatagcttagctctgccaataaccagtcaaatggatttagaaatatcacatagtgcctattcacaatagcaaagacatagactggattaagaaattgtggcatgtatacaccatggaatactatgcagccataaaaaaggatggggtcatgtcctttgtagagacatggatgaagctggaaaccattattctgagcaaactatcataaggacagaaaacgaaatactgcatgttctcactcataggtgggaaatgaacaatgagaacacttggatacagggtggggaacatcacacactggggcctgtcatggggtgggggggaggggggagggatagcattaggagataatacctaatgtaaatgacgagttaatgggtgcagcacaccaacatggcacatgtatacatatgtaacaagcctgcatgttgtgcacatgtaccctagaacttaaagtataataaaaaaataaagaaatatcacatagtggctcttgtctcagttttctgatctaaatcagggataatattatttcgcccccccccattttatggttttgaacataaaatcatacaatgggtatgaaagcactttggaaaatgaaaagtggtgattcaaatataagattttatcaggggaggaggcaatgttatttgtaacttgttctctagaagtataacaattttggaattgaatcatctttagaaattattaaaagcactaaattattgttttctttcttttttcatcccttaacatgatattgtgactaagagtgcttgttggataaagctttgatgtatgagtctaaaggggcttggagtagcctctcaccaattaaatttcctctagacaaaccccgcataactttaaaatgagctaatgataataatacgaggtacgattttctggaaagtgaatcttttgtcagaaagaagattgggcagtaaatatgtctcaggagggagctgaggtctctacacagttcaaactaaatgcacaacagtatttcagatgtcacaaggtgactgcatctcctagaatatcattaatcaatgttctagggttttgatagagaaagcatcctttgctctcctggggctcttgtgctttttccactgagtatttcctttggaaaagttgtcatccttctttctgcattttatgagaagctgcctctctgcctgagctgttggtttgtaggtcagagttgagtggtcacatgggaagagctaggaagaaaaaggtttggagtaagactgctaagtctaccgacctcaaccagactgggtgtgggtttggggtgggtgggggaaaagagaaaccaatgttcccggttctgggtgcttgagggtctcctctatggggacagccagggctgagttgctcagtgatcaggtgacaggtcaggagggagaacagggatgacagtgttgggtcatataacatgcaatggaaggactatctaatacaaaacaaaaaaaaaagcagctcatgcaaaatagttatcttacattcacttaaattttgtttattcacacccacccttgaggctgctggttgtctttctgtgaaactgcccaggatggctggttttttgtcttgatatagtggaaatcacatgaatttggagtcagataaatttgggtccaaatcccagctctgccttctcacagctgtatgaccttggacacactatctaaccccagtgtgcaatatgggaaatgggctcctcctcaaggatttggtggaaggattaaaatgatatattaagttggtacaaaaataatttcggcttttgccattacttttgcaccaaccgaatagcttgcagctcatgccttgtattcaatatattcagtgtcactatcactattctctccatctcccctactcctgttgcttctatgatcagttagtctattacatttatcatatcagtattttatgcttttgttgtgtctcaactataggaagtattaaaagggaagaaagaagttgaagaactacatagtaggaaatatcccaaatccaccatctcttctctctgggaggtggtcttagtttctggaaacgttaatactaagtcatcagcaacccttatgcataatagtaaatgagacagtcactattcttattaggatgctatcttagttggattgggctgctatgacaaatgaccttaaactgggtggcttataaacaacaggtatttcccacagttctagaggctgggaagtccaagatgaagacactgacagattcattgtctgctggggggcccatttcctgcttcatagatgatatcttcttcttgtgttctcacatggtggaaagggatagttgtctctcgggtctctcttataagggcactaattttattcatgaatgctccaccattgtgacctaatcaccttccaaaaggccccacctcttaatagcgtgggagttagaaattcagtatatgaattttggggaaacataaatgttcaaaccatagaaagtatgggtttttccaaccaagagaacttttggtagggggcttttctgtgatttactttagcctactagctgttgaaaaaattctccattgcataatattctagctgaattatttatattgcctacaacttgatagcacatttttactctagagaagacattacaaaatagtaactggccatcacagagtatttacattttatgacaggttatttacaaactagcttatttcttacaaccaatgcataaagtagattattttctttgtaagtgaggaaatagaggtttagagaaattgagtgttgatggacacataaagaagagatagcattcatgtttacatcaaatgactccaaaacccatgctctgttaaataagacagtcaagtaagtctaacctaaatagagctgctttctttgagacttctggttgtgtagttcaattagagctggaacgatcacttacacaaaatcatttatattttagtgctactggaaaaattgagcctctgcagtgttctgcttttatcttgctttactttcattaggctggacttacctttactgttttacttttgatgccattgacctggcacacaaacctagggcatgatgtcccagtttcagaggcaagaagaaaagaatctgctttatttaaaaactatatgctatatctggagtttttctagtgagcttttagtgctcatgaaaggcagctacatggaatttcaaatgacaacttagacaaagatatttaccaaataaacacataaagattccataggtttgcaaaccatcttctttccgggaagacgtagaaaagactttcaaaaggcatggatgactcagtcaatataaaagccttagacctctctttctcagttccaccaagtcctaacctgaactcaattagttaacacagtctctgttgctatcatcctagttcaaaccaccacctgggctgacaccttttatattgcccagtatccagttttcccgtaacccctatgatctagcacactgcaatgtctgagttactacaccagggtaagcttatttttcttactttaagatatttcagctagcaatatcctctgctgagtattctcttcctttgacaattacatcattagcttgttgggtcttagcttagttgctatttctgcagaatgacttttccaactttcccctctaaagcagccatcgagtgactctctgtctcatctgcctcttacttttccccacactatgtattatgatttattatgttactgcttatttatagacttatttcttaatcttgaaacaaacttttcagacttctttgttcaggaacttcagaaccatgaacagtgccacacacctagtgaatattaaatatttgttgagttcataatagagatcttattttttttaaattttattattattatactttaagttttagggtacatgtgcacaatgtgtaggtgagttacatatgtatgcatgtgccatgttggtgtggtgcacccattaactcgtcatttagcattaggtatatctcctaatgctatccctcccccctccccccaccccacaacagtcccccgagtgtgatgttccccttcctgtgtccatgtgttctcattgttcaattcccacctatgagtgagaacatgtggtgtttggtttttttgtccttgagatagtttactgagaatgatgatttccaatttcatccatgtccctacaaaggacatgaactcatcattttttatggctgcatagtattccgtggtatgtatgtgccacattttcgtaatccagtctatcattgttggacatttgggttggttccaattctttgctattgtgaatagtgccacaataaacatacgtgtgcatgtgtctttatagcagcatgatttataatcctttgggtatatacccagtaatgggatggctgggtcaaatggtatttctagttctagatccctgaggaatcgccacactaacttcctcaatggttgaactagtttacagtcccacctacagtgtaaaagtgttcctatttctccacatcctctccagcacctgttgtttcctgactttttaatgattgccattctaactggtgtgagatggtatctcattgtggttttgatttgcatttctctgatggccagtgatggtgagcattttttcatgtgttttttggccgcataagtgtcttcttttgagaagtgtctgttcatgtcctttgcccactttttgatgggttgtttgtttttttcttgtaaatgcgttggagttcattgtagattctggatattagccctttgtcagatgaataggttgcaaaaattttctcccattctgtaggttgcctgttcactctgatggtagtttcttttgctgtgcagaagctctttagtttaatcagatcccatttgtcaattttggcttttgttgctattgcttttagtgctttagacatgaagtccttgcccatgcctatgtcctgaatggtaatgcctaggttttcttctagggtttttatggttttaggtctaacatgtaagtctttaatccaccttgaattaatttttgtacaaggtgtaaggaagggatccagtttcagctttctacatatggctagccagttttcccagcaccatttattaaatagggaatcctttccccattgcttgtttttctcatgtttgtcaaagatcagatggttgtagatatgcagcgttaattctgagggctctgttctgttccattgatctatatctctgttttagtaccagtaccatactgttttggttactgtagccttgtagtatagtttgaagtcaggtagcgtgatgcctccagctttgttcttttggcttaggattgacttggcgatgcgggctcttttttggttccatatgaactttaaagtagttttttccaattctgtgaagaaagtcattggtagcttgatggggatggcattgaatctataaattaccttgggcagtatggccattttcaagatattgatacttcctgcccatgagcatggaatgttcttccatttgttgatatcctcttttatttcattgagcagtggtttgtagttctccttgaagaggtccttcacgtcccttgtaagttggattcctaggtattttattctctttgaagcaattgtgaatgggagttcactcatgatttggctttctgtctgttattggtgtataagaatgcttgtgatttttgtacattgattttgtatcctgagacttcgctgaagttgcttatcagcttaaggagatttttgggctgagaaaatggggttttctagatatacaatcatgtcatctgcaaacagggacaattggacttcctcttttcctaattgaataccctttatttccttctcctgcctgattgccctggccagaacttccaacactatgttgaataggagtggtgagagagggcatccctgtcttgtgccagttttcaaagggaatgcttcctgtttttgcccattcagtatgatattggctgtgggtttgtcatagatagctcttattattttgagataggtcccatcaacacctaacttattgagagtttttagcatgaagggctgttgaattttgtcaaaggccttttctgcatctattgagataatcatgtggtttttgtctttggctctgtttatatgctggattacatttattgatttgcgtatattgaaccagccttgcatcccagggatgaagctcacttgatcatggtggataaggtttttgatgtgctgctggatttggtttgccagtattttattgagaattttcgcatcaatgttcatcaaggatattggtctaaaattctgttttttggttgtgtctctgccaggctttggtatcaggatgatgctggcctcataaaatgagttagggaggattccctctttttctattgattggaatagtttcagaaggaatggtaccagctcctccttttacctctggtagaattttgctgtgaatctatctggtcctggactctttttggttggtaggctattgattattgccacaatttcggaacctgttattgatctattcagagattcaacttcttcctggtttagtcttgggagggtgtatgtgtcgaggaatttatccatttcttctggattttctagtttatttgcgtagaggtgtttgtagtattctctgatggtagtttgtatttctgtgggatcggtggtgataacccctttatcattttttattgtgtctatttgattcttctctcttttcttctttattagtctagctagtggtctatcaactttgttgatcctttcaaaaaaccagctcctggattcattaattttttgaagggttttttgtgtctctatttccttcagttctgctctgattttagttatttcttgtcttctgctagcttttgaatgtgtttgctcttgcttctctagttcttttaattgtgatgttagggtgtcaattttggatctttcctgccttctcttgtgggcatttagtgctataaatttccctctacacactgctttgaatgtgtcccagagattctggtatgttgtctttgttctcgttggtttcaaagaacatctttatttctgccttcatttcattatgtaccccgtagtcattcaggagcaggctgttcagtttccatgtagttgagcggttttgagtgagtttcttaatcctgagttctagtttgattgcactgtggtctgagagacagtttgttataatttctgttcttttacatttgctgaggagagctttacttcaaagtatgtggtcaattttggaataggtgtggtgtggtgctgaaaaaaatgtatattctgttgatttgggttggagagttctgtagatgtctatttggtccgcttggtgtagagctgagttcaattcctgggtatccttgttaactttctgtctcgttaatctgtctaatgttgacagtggggtgttaaagtctcccattattattgtgtgggagtctaagtctctttgtaggtcactcaggacttgctttatgaatctgggtgctcctgtattgggtgcatatatatttaggatagttagctcttcttgttgaattgatccctttaccattatgtaatggccttctttgtctcttttgatctgtgttggtttaaagtctgttttatcagagactaggattgcaacccatgcctttttttgttttccatttgcttggtagatcttcctccatccttttattttgagcctatgtgtgtctctgcacgtgagatgggtttcctgaatacaacacactgatgggtcctgactctttatccaatttgccagtctgtgtcttttaattggagcatttagtccatttacatttaaagttaatattgttatgtgtgaatttgatcctgtcattatgatgttagctggttattttgctggttagttgatgcagtttcttcctagcctcgatggtctttacaatttggcatgattttgcagtggctggtaccagttgttcctttccatgtttagtgcttccttcaggagctcttgtagggcaggcctggtggtgacaaaatctctcagcatttgcttgtctgtaaagtattttatttctccttcacttatgaagcttagtttggctggatatgaaattctgggttgaaaattcttttctttaagaatgttgaatattggcccccactctcttctggcttgtagagtttctaccaagagatctgctggtagtctgatgggcttccctttgtgggtaacccgacctttctctctggctgcccttaacattttttccttcatttcaactttggtgaatctgacaattatgtgtcttggagttgctcttctcgaggagtatctttgtggcattctctgtatttcctgaatctgaatgttggcctgccttgctagattggggaagttctcctggataatatcctgcagagtgttttccaacttggttccattctgtccgtcactttcaggtacaccaatcaggatgtagatttggtcttttcacagagtcccatatttcttggaggctttgttcatttctttttattcttttttctctaaacttcccttctcacttcatttcattcatttcatcttccatcactgataccctttcttccagttgatcgcatcggctcctgaggcttctgcattcttcacatagttctggagccttggctttcagctccatcagctcctttaagcacttctcttattgattattctagttatacattcttctaaatttttttcaaagttttaaacttctttgcctttagtttgaatttcctcctgtagctcggcgtagtttgatcatctgaagccttcttctctcaactcgtcaaagtcattctccatccagctttgttccgttgctggtgaggaactgcattcctttggaggaggggaggcactctgctttttagagtttccaggttttctgctctgttttttccccatctttgtgattttatctactttcggtctttgatgatggtgatgtacaggtgggtttttggtgtcgatgtcctttctgtttgttagttttccttctaacagacaggaccctcagctgcaggtctgttggagtttgctagaggtccactccagactctgtttgcctgggtatcagcagcggtggctgcagaacagcagatttttgtgaaccacaagtgctgctgtctgatcgttcctctggaagttttgtctcagaggagtgcctggctgtgtgaggtgtcagtctgcccctactgggggatgcctcccagttaggctactcgggggtcaggggtcagggacccacttgaggaggcagtctgcccgttatcagatctccagttgtgtgctgggagaaccactgctctcttcaaagctgtcagacagggacatttaagtctgcagaggttactgctatctttttgtttgtctgtgccctgcccccagaggtggagcctagagaggcaggcaggcctccttgagctgtggtgggctccacccagttcgagcttcccagctgctttgtttacctaagcaagcctgggcaatggcgggcgcccctcccctagcctcgctgccaccttgcagtttgatctcagactgctgtgctagcaatcagcaagactccgtgggtgtaggaccctccgagccatgtgcgggatataatctcctggtgtgccgtcttttaagcccgtcacaacagcgcagtattagggtaggagtgaccgaattttccaggtgccatctgtcacccctttctttgactaggaaagggaactccctgaccccttgcacttcccgagtgaggcaacgcctcgccctgctttggctcatgcatggtgcagtgcacccactgtcctgcacccactgtctagcactccctagtgagatgaacccggtacctcagatggaaatgtagaaatcacccgtcttctgtgttgctcacgctgggagctgtagaccagagctgttcctattcagccatcttggctgaccctcgatagagatcttatttatattgagttgaagatgaaagacaaggagatatatagtcagcagtatctttcaatataaaagataaaaatgtgtgtataatgttatacattattgtattgttaatacatgaaacaatatttaaatatattatgcacataaaaatacatgtatatttctataatgaattaatcagaatggctttttaacaacataatccagatcatattactcttattcttaaatcctttcaagacttaaaggccctacatgacttgcttcctgtttcaggtgtattatctcctataattttctctcttacacattctctttgagccatttctggccttcacgctgtttctcaaacatacaaggtccatcataatttagggtatttgcaataattcctcattctgtctggaatggtcatcccttagatcttctgtaagtctttgcttaaattttaccttttctttatttttttatttttatttttgagacagagtctcgcttggtcacccaggctggagtgcagtggcgcactctcggctcactgcaacctctgcctcccaggttcaagtgattctcctgtctcagcctcttgagtggctgggactgcaggcacaccaccatgcctggctattttttgtagttttagtagaggtggggtttccccatgttgtccaggctggtcttgaactcgtggcttcaagtgatctgcctgcctcggcctcccaaagtgctggaattacaggcatgagccactgggcctggccctaaatgttaccttttcaatgaggtaatcctatttttcttgttggcaattccaatctatttcattgccgatcttttgcactcctcatcttccttattctgcccactattccctgatagcatttgtcaatctctaatacactctgtatttacttacttctatatgcttatacattttattatttatctactttaaaattgtatgtattatttattgtctgtctccactagaataaaaccttgggagatgaggaaaacatgggtttttgacattttatttcactcttgcagcagaagttcctcaaacagtttctgggatataacaggttttcagtaccagttgcttgtgaagtaaggagggccagtccaagtctcaaactgaagaacttggaacctgatgtttgaaggcaggaagcctctggcacaggagaaagatgtaggctgggaggctaggccagtcttgcttcttcatgcttttctgcctgttttatattcactggcagctgattagattgtgcctaccagattaagggtgggtctgccttccccagcccactgactcaaatgttaatctcctttggcaacatcctcatagacacacccaggaacaatactttgcatccttcaatccaatccagttgacactcaatatcatccatcacagagggccttctaagcctttggaatttaaaagttgcattatgacctcagttccctgatgggttgaataaaatatatgattttgtgaattgtttgattttttttcattgtaagggagagatattctcttgtaaatttctatattctaagttcaagtggagactttgttctgtttattttaatgtaattcttgctatggttaggtttgtctatcatttttctagttgttttcaatttgtccaatctgtactttaaaaaaatagcaatgtgttacccataatcaggaaaaataactcaatagaaacagacttagaaatgatagatgaaggaattagtaaacaaaaacttctagataatgaatataattatgttcaaggatataaagaaaaacattcacacaatgaggaatctcagtagaagtaaaaacaaaccacgtagggattttcagttttagaattaaaaaatacagtatctgaaataaaagtttcactgatgggcttatcagaagattagcctttataaggaaattccagtgataatgaagataagacagtagaacttgaagcactgagggaaaaacaatataaattgaagtgaactgaaccaacatcaagtgagacaacatcaggtgtcataacatttgtagaattttatctcagaaggacagaagacagagattattcaggaaaaaattgagaaaataatgacttaaaaacttccaaatttaaagaaaaatagcaaccctaatcagtgtaaacacaaaaatgccataagtaggtacacacatgaaatcagtaaaacatatgaaaaccaaggataacaagaaaatagcagctagagggaaaaaagatgtatttcctatagagggtcaatgttaaaaatccctttgacttgtcagaaataatgcaagccaaaaagccatggaatgacactttaaaatgctgaaagaagaaaaaatgtcttacaatgtgcacatgtaccctaaaacttagataataataaaaaaaaaattaaaaaaaaaaaaaaagaaaaaatgtcttgtgttctatgttcatcaaacttttttttttaaaattggaggtaaaataaaaatgttttcaaataaacaaaagctgagagaacttgtcaccagaggcttacgctgcaaaaaatgtttaaagaagctctcaggctgaaggaaaataatacaagaggatatttggacctacatgaatgggtgaagtgaaatcagaatggtaaatatgtgggtacacattaatgaatgttctcatttctcaatttatttgaaaaataattggctgtttacagcagatattggtaacagtgtattgtggagtttctaacttagggagaagtaaaatgtctagtaataatagtgaaaagtggggaatgggaattcactgtgtaaagattatcagattatacatgaggtggtatagtattcatgataaaatgtgtttaagggtgcatattgtaatctctagagaaatcactaataattatacaaaatattatggcttaaaaaatccaacaaagaagataaaacaaaaacctaaaaatggaaaaaaaaaaaagacagcagatggggaaatcatttgatttttgtttgcttgggtgacatgggattacatattctttttttttttttttacagatttaataatacagtaagctaaacattttaattgttatttattacttcttactttctagatgtcagtccttaggaaaatcactgtaatcctctgagcttcactttcttcagtggaagaacacgtggttaggctacatgattgctaagagcccaatgattcttaatttctctaggttttagctctttgccctgtaactgagattgtaatctgagcagaatttcaacatgtcctttctttgatgggcagtggggagtcttgtgttacccatgttgtcagcatgtaattagatttatgtaggtccaagaaagtagggatgcttggggtctcatggcagcttcagattgataagaatctgctttcacctgacttaatggtgtctctaattgagccacagaatgcagaaattatagtttcatttttctgagagcatcttatgttctcagtggcatttgtggcttcctgaataattaagctaggactaggataaaatttcttcctgtagcccataaaggttaccagtatgtggccacaaaataggttcgacttccttatagtaacttttttttcagtataattccccaccaagttgctggaaattagcccctctttatagctggtaatgtctgaaatttagtgtgtgtcctgcaacaaatttctcagatatgtctttctggtcccttcaacttaatatgttgcttctgaagcttgtaatatggccgattttgtctctctttctctctctgcctttctcactctttgttagccatgtagagggcagaaggtaattcctaactcccttcagcaaaactgagaccacaactatgatttttaacaaggctttggttaaggcttgggtcaacaaaactatggttcagaggtgccataaatggagacactaaacctgcaggtgcaaatttgacatccaaattccttagcacggcatctttctatgtagcttcaggtctgctttctcctagaagggattcacttacctccacgcttggcaatgttccaagcatttccattctttggagtcaactattccctcttctctaggctcttctcaatgatttctacagactaacctattcccagggttatttatttttgttcagaatatttatattttcactatgcatcaataattatttagacctaactataggttttactggtttatttgttaccattttttgcttaagcctaaattattctctttttcctgtttctatttttgctggagtgtatcctaaatatttcttttatagatgctctgtgattgggtaactttctgagtcttcagaaatctgaaatagtctttattattccttcctggttgaatgttagcttgactgtctaatatttcagtctcatataattttccttaagtaatacaatttccccattgtcttctggcaatcagtgctaccagttagatagcccatgatggtctatttcttttttcttagtggctaatttctccatttgatttcccgttttttgaaaaggctttcatgacctttttcctttattttgggggttttgaaatgtcatttgccttttttctaactacagaacacggctctttcttttgaattcccattgtctgacattctttgcgataaagatcctttttagcactgagaaattttctcctggaagatacttaattatttcttctccaacatgtctattcttctcttttgacttctttttagatagaatctgggcattccagatatctcttctatgtcatttaatttaactttttcttcatcccaatctatcttgcttgtttctgttttgctctgggagtagtccgcagcccagtcctccaactcattaatttcattcttcagttgtgttaattatgtaattcagcccaactatacattctttctcttttttattacttttttttaaagtttgaaaatcatttttaaatttccaggatctctagttgttttttttcatggatttgctgttttcccaaatatgaaattatcaattacatttattaaatttgttctacttgttctattacatgttctcttcaaaatgtagttctcctagttgttgaattagttgactgtgtcgcagtgaaagatattagtcagagttcaccagagaaacagaatccaaggtacacacacacacacacacacacacacacacacccacacagatttattataaagacttggctcacattattatgaggctgagaaggcccatgatcatctatctccaagcaggagacccaggaaacccagtgctatatagttcagtctgagcctgaaggcctgagaaccaggactgtggatggtataaagcccagtccaagggctggagaagactaatgcagagagagaggtttcaaacttcttcctctcctttgccctatttgggctctcaaaagattggttgattctcacccaccctgggaagggcaatctgctttacttacaccttcagttaaaatgctaatctcttccagatgattattaaggaagggtgagctactattctgggtatcctgtttttctaatgcaggagcttgtgttccattagcattgacggcattacccaggtgttcccaccaagtcttagctgctgttttgtgcagggtggggaaagcgcatcaacctttttgctgctggctgctcagtacaaactcaggacgtagtagggatcatcctacttgctactctctgcttgtagaacctctgcctccaatttcatctacctacacacttgcctctggcaggtgtcttgggctatagttttctttgtcaatctgaccctgtgtcctcattcaaatctcatcttgaattgtatctcctgtaattcctacatgtcatgggagggacctggtgagaagtaatgaatcatggaggtggatcttacccatgctgttcttgtgatagtgaataagtgtcacaagatctgatagttttataaaggagagttcccctacacgagctctctcttgcttgccaccatgtagacgtgactttgctcctcctttgccttctgcaatgattgtgaagccttcccagtcagtggaactgtgagtccattaaacctctttttccttataaattacctagcctcgggtaggcctttgttagcatggtgagaacagactaatacagtctgatttctatttttgcaaaatttttacagaatttccattacatggatgacactctttcttgtttccttatgttataggtttcttatttttgtaagcacatattttattctatgtctaataatttgggatattaggggaatgtggtatatgtgttcaattcagctcaccatgctattctctgatccctccaatggtttcttatctctgccacaattatagaccctcaagtcctctccacagcctcttttgaccttcatgatctgtccccaggctacatttctggcctcattttctattaatcttcccctgttgattctgctccagttttcttgaccttgttgctgggttcacaaaaacaccaagctatgctcctgtgtagtgccttcgctgagcacttgctgtttgctctcttctggagttctttccccagagctgcatgagttgttcacaattctgacagctccctcctgtcctaattattgagatagtttctggcatttcacctttatttagtgtgggccattattgacttcaggttacagtaaaaaacaactgaatgtaattaaacaattagaactactcttagctactcaagccaaaacatcaaatccagtatttctcatgatgataaattcctgaagcgaaattgtgtttctttgtctctaagctagaatactcaaaatccattctgacataagtgtcttgaggtgtttttcaatataaatgataggttttggctctgtgtccccacccaaatctcatcttgaattgtaatctgcatgtgtcaagggagaaacctggtgggaggtgatttgattatgggaatggcttccatcatgctgttctcatgacagtgagtgagtctcatgagatctgatggttttacaagtgttgacagttcctctttcagtggctttcttttagctcctgctgctttgtgaagaaggtggcatgattgtcagtttcctgaggcctccgcagcctttcctttataaattacacagtctcagggaagttctttgtagcagtgtgaaaacagactaatacagtaaatttgcaaaactttgttactatttatgtataaaccttcttctctctggtttgattttgtaattaggaccctagagacggatgagatcaattataataatagagttgaaggcaatgaggggcagtcaagggtgggggcatagagaaaataatcatttccttaaatagtaagtcttttaggtgacattattatgtgggctctacacaagtcacgaccagccttatcacacaagggagcaatggctacttctgctggcagggaagaattagtggacttcaggtttgcggtactcctttaaatgtcacccttccagttctcagcaccctgtcatttacaatcacaaccttaactttcacataagagaggctgtgaattgcatctgtgttattacttagcaattgctttgcagaatcatactctgttttcagttacaacagctgtatggagctgcaagttgaagtttatttaagaaaatcatagaagttgcctggttttcttactgtgtcttgagcagaaaatttaaactgccaaatatgtcattttgtttatttaaacttttcagtggaggcagagtagccacctcactcacagaattctaatcatcctgacaatcttttcactatgctataacaattgatattcagtctgattaaatcataacatcaaaaagcactgtaattcagatgatcacaagtaattctttaagttgctgttatgccactatttggagtccaaactttaaaacctccaaatccaagaaggggggaagatagttttagattcctgtccttgttggtctgttgcctataatcttccctgctaccaaattctttttaatgttgagttctgttgtagataacagaaaccactctagctattttaataataaaggcatttaacatattatgtactcttaaaattgtgggagtagctgaagagagctctgtggaggctttccagggatccttcaggaatggttcctagaacatcactggaaaagtggctaagagagcagttgccttttctatttcagaataaaagaatggttagaaagttggagagatggtttagctttgtgtccccactcaaacctcatctggaattgtaatctcccagtgttaagggagaaacctggtgggaagtgattggattacagggacagtttcccccaggctgtcatactgttctcgtggtagtgaattctcaagagatctgatggttttataaatggtagcttttcctgtgctcacacacacacttctctctcctgccaccatgtgaagaaggcccttgcttccccttcaccttccaccatgattgtaagtttcctgaggtctccctagacatgatgaactgtgaatcaattgcacccctttcctttataaattaaccaatcttgggtatttctttatagcagtatgaaaacggactaatgctgctggggaattaggaaaccattatctcaattgctgggtccagaaaacaggagggagccatttccagaataattgaccatcttagctgtaatcccttctagcacagtggatgcacaatagcctggctctcaaagggcatgagtctagggacttgacactgggaccattgctaccactgccacaggaaagctctgttattcccacaactcacctttccagaagacacagtagaagcagaaaaatcctatttctgcctcccttttttcttccacatctcacaaggatgtgaatgcttggtggtatctaggttatgtatcaaactccaactgtacaggaatctgggagatgtaatcttggctttcctgttctaaagggtgcagttacaatacagcataatggagttcagggggttaatctataacatcaatcatactggctgttgttttctcttttgcacttgctgcagatatgtcaaatatgttttacatatttttaatgaagtcatttgttagcgattttgaattttgatgtggccaaatttagcaattttaatttataaattttctttgcttatctcttggttaagaagacctttcctattttagtaggataatatatattctcatccaattgtttcagctttttgttttgtgcaaatgacatgagttgggacctaaatttattttttgggcatgtcatcacttgtattaacactattagttaatagttgattctttcctagtaacttgaaataccacttttataatatactaatgttccatatgtgcatatgggcttgtttctggactttttattctataacaaatatttatttgtctggtttcatgcattaattaccatagcttctaattcatcttaatatttggaagggcaaatcacccctatattgttctcctttttcataattgtcttggctgtgcgtctgcatttactttttcatattaattttagaattagcttgtcaagttttatttaaaaatccttgagacttttattataattgaattaactttatagattaatttggaaagtttgatatctttataatattgagtcttcccatccaataacatcaaatatctctccatttattctggcctccttttatgtctttcattaaagttttgtagcattttccaaagaaggtcctgtgtatttcttgtaaagtttattcctagaagctttatagtatttgattcttttatggtaaataggatctttttatagaaaatatattgattgtgttatattgctcttatatctggttttattgctgtaatctttctaattagcttaatgattaaagtttatgtgatttggggactgggaaaagccttctactaggacagtaaagcagaaaccatgtgtacagattttgctagttttttctgcagaaaaataaagattataaaacatgataaacataaatggaaaaatagtactgagacaacatttgaaatacataagacagaaaaaatactgatattacttacaggtgaagggcttcataataaacaaaggaaaagatgatcaccataatagaaaaaaaaggctaaggtcatgaataaacaatctacctaaacaaaaagaaataagtatttgcaagaaatgtgaggcaaaggtcaagctcattaataaacaggaaatgctaacgaaaatgttttaatccaccacctacaaaactggggaagctgaacaagggataaccctcatgttgtcattagtttggagaaagagaaaaaagaaagaaaaaagggaaaagagaaagtcttttacacttgtagacccttcttgaagattctttagtaataaatatcacgagctttaagttgctcctgcacgttaacccagcaatttcacttttaggcattctaagatgtgtatttctgagacatcttaatggatatacatgactatgaggaattttctgtggtttggcaaaaagctaacttaaagtttttaagtaacagaactcaggatttgaaatgtgctaatgtacattgtaaactgcaaaataatatattttaaaagttctcatttaaactttgattatagaactatttttgggcagagagtacttcaagagattagaccaccatacgcaatatgatttgagaggtatgggcttgacattatcataaaagcatgtaacaatgagctgtaagtgtgttcataatagcattgtacacaataacaaaaatagttactataaatgtgtaagaatatgtaatgtttaaataaggcacactatattgatttcattgaatcttatagtcatcaaatacattttagaaaagtaattaatgcagagaaaatgttcctgatactttttaataagaaaaaccaggctataagctttatgtatagtatgtaaaatactttgggggtacatatatgcacagaaacatgggtgtaagtaggattatcaaaatgtgaatagggataactgttactttgtgttattattagtgacttatttcttacctttactgttttgtttttcctttaattaaacatcaatgacctttattctaggaaatatgttttcttaaagttattgcaaataaatcatccttttattttcatgaattaatgttgaatgtgtatcctcccactcctctatttcttttttttttggttttgggtctttactgagttctgttcatattacgcattgtttttaattgtatttaatattctatgcagctgtccttgctctttcgaggtgacatttaatacatgaatttttaagtcagactttatctttggtgcagaaaataatgcccttttaaagcatctgctgcattttaaaatgtgttttcagataatatctcttccattcatcactaacctcataagtgagtaggttacatgaaatctgaccacttcctagtcctgaggacagtgtgtcatataaatggcaggccaacagagtttgacccttgggcacagtgtctattttgcagttctttctgctttccaacaccattcacaaaaatgtaggcactaccatgcagctctttaaagaactcactggccacttcgttttctctttgaacgaggctcccccttgtaaaaagccagccttcactgtttttgcacttctgatccagcttccttgtcctccttctcatcctagtattttttattgttttatagtacctgcccatgtcgtgataagcagcaactgtgtttcagaacctttccaccatatttgtcttctccacttgcaattctttctcttattaccacgaacagtttccctcagttctctgaccattcgtaaatcaatctcataaatttatttgtgctcttgtcttaataacttataatgtatagtcttactgatgggagctctcagggaactctcagtaactctcagaaaagccatatctactgttagtgtcaggcccacatctcaggcccccaaagacttttcctctctgcattttggattcaggctgcttctctctctcagtgaccaatcattccctctaacttctcattgttaggtctgacatgttcctgtcattggacgtttgcactggctactctcactacttgggatattttttccctagttatcatcttctcaaaatatttgttcaaataagatctcgatgcaacgtgtctgagcacctctctttaaaattgcaggccccttcctacctcctgacctcttgtcatttctcttttatctttctgagttcaccttttccttatagcaggcatcattttgaaacaactctgacaatgtacttatttattatgctgtcctgaatgtcttctatgtattcttccagatccactcttcacacctctttgctctataccctaaaagccggcttgtgagcacctgagctcagggcaggatcatcacacactggctgagttcctgacccacactcacaatcctgtaaggtaaccttatcctgttttcacatttctgtaacagcttcctccatcatcatacatctattgtttactctctgtttctctgtattttcatggaagctccatgagggcaaaattctgtctgttgttcactgacagatcttgtgcgcccagagcacagcttggcgaataatagatgctcaggaaatacctgctgaatgtttaatgattattggctctggcttcaaaaaaatacagtttcagcccatttaccatatccctcatcactccttttttttccctaccttcagagtttgataatttacattaattattcctcttgcctttttaactttaaataatatgcttaaaactttattttttgctctataaaatttagacaatatccttgatttcctcctttttgaaaaaggattagagctgctcttctcccctccccctgttccattgtttcacatctttataatattaagctcaacaacaaccctgctgttttaagctctatattagctgccataacctaatactgcagactgggcggcttcaatgacaaatgtttactttcttgtagctttggagactggaagtccaatatcaaagtgtcagcaggtttggtttctcctgaggcctctgtccttagctggcagttggccgcttctcgctatgtcctctcttggtgttttctctttgcacgtgcgtccctggtgtctcttctgtgcgtccaaatgtagtctttttataaggacaacagtcagattggattagggcctgccctaacggcctcatgtaaatttagccatctgtttgaaggccctatctccaaaggcagtcatattcctcggaattggggattaggtttcaacatctgaattttttttttaatttttaaaattttctttctttctttttttttttttttaagagagagggcacaattaagcccatgacaagccccagtgaattctgctgtatttttatttatttattcttagtttccacgtacaacactgaattcagctttattttgtctacagtttggttctaaaagtttaaggccaacatataatattgtatattgaatatttaaatctactaaaggctttatcaagctgtgtgttagaattgcattcccttcacaggacttctgtagcaatggaggaggaatattcctagggtgatgtaaatggattatttccccacattctaaaatcatgccactttttatttgctttgtatttcaaatgacttcccaattcagttgcatgatctgcatggctcacagaatatcaaacttaacgtaattttctcttgacatcctgtgagcagtgtctccttctctggcacccgctgcttacatttagatgcatttgtctttctttgcaggtgaacaatttctttttctctctggaactttcgaatatcgtgtccatctttgcagttctcaaattttataagtttttctcatcagtcttcttaagtctcctgtctttctttagtactagcaaattctattccattccattctattttaatttttctttttaaacacctgttgacaatgaatttttggtctcttcatgtctcttaaactttctgtcatattttagagctccttgtgttttaacttcacgtaatggctaattttcttcttactttccaatcttgggttgagttttctattttaagtactatattttaaatttcaaagagaagtttcttatatagctgtcgtaattacccttaagaagaaaactataattaaagttacgcttctttatcaatatcaatgacaaaactccttcttgtatcataaaaatcaattagtaaacttttactgcctctattttttcttctgtttatccttttaaagtctgaaaaatttggaaatttttactggcttatgaatattaccttacacctttaaaaattatttaacacaaaattaaatgtcttcaaatgttatttatggtatatacaataaaacatatgagatttttagatttaattctacattttagcattttcagtgctcactgccagtccttattgtagtatgtattttctcatttttggttattaatattgaccttttctcattactttgagaatagtccccccaccccgaaacattatagatgttatttcctgagtccttgtgcgtatgatcacctttctgttggttttccatgtaaatgacaaagtgaatggcctcagaactcttgatatttttcactcacgaccataaagacattagaaatctccttgacaattggagttgcttgaagagaaatgggagtccagctctatattttcttctttgtggctgtctgaattcttataccatgattactttttttagtccttgaagaaaaataatcactggaataaagctaaatgctagtttttttcagaatattgttttcttaatattctgtgctataaatttgtaggtgtaggtcttctgcataggaaaatatttcttttatgtagttgatgattgcttttgtaatattgattctgatctctatggaaacactgactattgctattttaaatcatgagctattcttcataatctgtattctttctgattgctttcataacttatattttttctgcattttgatagaatttgtcatttctatgtttgtaatctacaacagaatatagattctgtttcttattgctttcaatgtcatcttaaatcttattatatcataacttacctatattatttccttacaataacttctcagttttcatttcagtctcatagttgttacatattgtctttcctctgtgttttgttgttatttactttctatgagagtataaagcagatgtttgctagagtaaataattttcaaaaataagctctttctctggtgtgttttgtgtttatttctcatttatactgcttttttatttttcagactttgctgttatttatgcttacttatttttaaatgagaaaaggtctattctcttctgatatttgtcctgatatgagtgacttctctttgggcttcagaactagtctaacagaaattgatggtatcttgtaggaccctacactaaaaagccatgactcatcttctgttagggtgtgggtttgtggaaggatctgggccatgggcagttatagcagggaactccatctgtgtaaatatccttctcttctggagtgttgaaactgccctactggcactaaccattaatcctgaaggcaattgattatgaaggtttatgtagtatattagtccattttcaaactgctgataaagacataccagagactgggaagaaaaagaagtttaattggacttacagttccacatggctggggaggcctcagaatcatggtgggaggtgaaaaacacttcttacatggtggtggcaagggaaaatgaggaagaagcaaaagcagaaacccctggataaatccatcagatctcgtgagacttattcattaccatgagaatagcactggaaagatgggtctcatgattcagttacctccccctgggtccctcccacaacacatgagaatcctgggagatacagtcaaagttgagatttggatggagacacagtcaaaccatatcattccaccctggtccctctaaatctcatgtcctcacatttcaaaaccaatcatgccttcccaacagtcccccaaagtcctaactcatttcagcactaacctaaaagtccacagtccaaattctcatctgacacaagtcaagtcccttccacctatgagcctgtaaaatcaaaagcaagctagttacttcctaaatgcaatgggggtacaggtattgggtaaatacagccattccaaatgagagaaattggccaaaacaaacggattacagggcccttgcaagtctgaaatccaatggggcagtcaaattttaaagctccaaaatgatctcctttgattccaggtctcacatgcaggtcacgctgatgtaagaagtgggttcccatggtcttgggcagctctgcccttgtggctttgcagggtatagccccactcccggctgctttcacaggctgacattcagtgtggattttccaggcgcatggtgcaagctgtcagtggatctagcattctggggtctggaggatggtggccctcttctcacgggtcccctaggtggtgccccagtagggaccctgtgtgggggctccaacacatttcccttctgcattgccctagcagaggttctccatgagggccccacccctgcagcagacgtttgcctgggcatccaggtgttttcatacgtcttctgaaatctaggcagaggttcgcaaacctcaattcttgacttctgtgcacctgcaggcttaacaccatgtggaagctgccaaggcttggaggcttggggcttccaccccctaaagctacagcccaagctctacattggccactttcagccatggctggagcggctgggacacagggcacctagtctctaggctgcacataggcccagcccatgaaaccctttttcctcctaggcatgtgatggcaggggctgatgtgaagatctctgacatggtctggagacattttccccatggtcttggggattaacattaggctccttgcaacttatgcaaatttctgcagctggcttgaatttctccctagaaaatgggttttcttttctatcacatagtcagactgcaaattttccaaacttttatgctctgattcccttataaaactaaatgcctttgacagcactgaagtcactgcttcactgcttagaaacttcttccgccagataccctaaatcatctttctcaagttcaaagttccacaaatctctagggcagaggcaaaatgccaccagtctgtttgctaaaatataacaagaatcacttttactccagttcccaacaagttcctcatctccatctgagaccacctcagtctggaccttattgtccatatcgctatcagcatttggacaaagccattcaagtctctaggatgttccaaactttcccacatttttctgtcttcttctgagccctccaaactgttgcagcctctacctgttacccagttccaaagtcacttccacatttttgggtatcttttcagcaatgccccactctactggtaccaatttactgtattactccattttcatgctgctgataaagacatacccgaaactaggaagaaaaagaggtttaattggacttacagttccacatggctggggaggcctcaggatcatggcaggaactgaaaggcacttcttacatggcagcggcaagagaaaatgaggaagaagcaaaagcagaaacccctgataaacccatcagatctcatgagacttattcactatcatgagaatagcataggaatgaccagcccccatgattcaattacctccccctgggtccctcccacaacacaacacatggaaattccgggagatacagttcaagttgagatttggatggagacagagccaaaccatatcatgtggcaaattataaaggctgctccctgtttcccttcagtccagggagtggagatggtgatctaacttttctcccctttgactgcctcctgtgactttgcatttgtttctcaggaagaggaattgtgaattgccccttggtaaggcctgtgaggtttgctgcaagtggacacctgtcccctcacactgtgtatccttcatttcttgggctgatgcccattttccttattactatgtttgttacatacgtggctatagagaagtttctatgttcctatgagtctcagtatgaaacaatcagtaaaatgttatccttttttaaaatgtgaaacattcagaaatattttataatccaggaaagcttacaattgacttttaaatcaggaaagtcacagtatgtgcctcaaaggcttgttgtgaggattgaatgagattagcctggtgctgcacatggtaaactcttggaaaattctagctcttatcatccatagtgggtattattaattttcgtgtttatgccattttattcagctttttttctgtccacatggccgctgttcctggaaatccataattaagatcttagtttggcctgctttgatgctgcctctgttgttggtgggccacttgtaaattcatatgccctttggatgagacttcaaagagactgaaaggttattttggacagcacagcctccacagagaaagctaatatattctttctccacaaatgtctcgtcctacccatctcacatcaataacaaatcacttaagatagctgatgactacagatttattagattatatgcagtcatcttcaagggcaacataaaaggtttggatggaatctaaaataagccttctgacatgcaaaatgctgatgttatactttaatcattgggtttttatttattatctgaaaatatttttatgagtatgtctttttcttatttactatttggttactcagtgattacatggaaaatggaggataaatgcatgatttcttccctttaccagtttttaaggtaatgagttggtttcctgtcttaagataagttaattttttgcatcattataaattcctgatttgatatagaattttatggacttcaattcattgtatttttattgatgcccaaactgaaagatcatatcatgcatctgaaaatatagatccagaatgaatctatatgacccccaaggtatattctagtaaaattactggactttaaagagaaacaaaaatcatttgggcatataagcaaaagagaatgtgatatttaagggggaagttagattatcctcagacttttcagcagcaatcctttatgacaaaggaaatgatgtgaatatatttaagatattcaaggaaagaaaatgtgagctaagaatgtattagaaactgaattttgttgatgaaggacacaatctgtaattaaaatgcaagaaataaagagctattatttccataaacttttcctgaggaatctactaaagaacattccagacaaaaatgagaaggaagacctcagcattaggactgatgatgaggatagaatatatagttatctttagaaatcagagtaaatgggggttacctttagaagtaaggataaatgaggattaaaagagagagtatggtctgcaatgactacatgctctgacaatgttgataaaatacaatgtctaaaaggagggcagattggggaaagcatatgtaaacatttttaattggtttcagtaatcagaattggctatgttactatcatctttctgaaactgtttgtataatgtggggcagagcatagataaattatgaggtattctaattctatatcatctgtgccttgagaaccagaattctcactgtggaagaaggacagtacagaagtaatataggacaaggtaggaaaattcccattgcattaatttgaaaaggaaatgtttgtgtgaactcataggacatcttaccttaaaaaaatctttctctttttctttctctttctttttcttattgtttctgtttctctctttacctatcacctgtctgtatcctagctttgtcctctgaaaaggccataaaacaatgaccagaccagtcacaatgaatattggtagcactgagattcttgcctttaaatattgtttcccactgaattgtctgtttctaggtcagggtagatgagcttgcaataatcatgtcattacaagtagcaggcaagctgtcaaagactactagattcatgtccaaaggactcaggagcaaaactgaggaggtgtccactggccaaatttgggccaatatgcccacagtttgttcaccattttattaggaatggtttcacaagtagagcaaaatatccccacttttcctgcatctctggattgtaccattaacattttactacactggcttcatcacacatctatccagctatccacccactaacctatcttatttttggatgcattttaaagtaaattgcagccatcttaactcttcttcctaaaaacttcagcatgaaaatgtccacttctaactcacaacactagaaatgaaacacaaaaatgaccctgatgacaggctgagagcactgaggagcaggggaaggacagaaacaggaaatctaacaaaggcagagattcagggtggctggaaacaagttcctagccttgacagttttgcctgaggccattcacaggggcatggttccccctctacctgagctttagccatttatcttcatatacatattttcccccgtcatctctgactttattcttattggatcctttatataatagagcagagcattcttgatattgcatttttaaacctaggataaagcagcttcttttatatatatcaagcttcgagcttgtaatagtggaaggaaaaataacgagtaagttattctctgagattatcatgtccccttaggtatgaggaaacttgttggctttgtctgccacattccagacactcagtaccactcagaactccctctgttgactgtgtttgttgctttttcacctaaggagcttgaaacatgctgtcactcctgccaggaaagcccactctctcagaatcacctttgccaggctaagtcctgtggcagagtgtgtatgtttgtgtggagctttgtgtatgttagttacattatgcaatacgcactttcacatacacaaatatactatttctctatattccccaacatttagtgtttaaatgtgacacacacacacacacacacacacacacacacacacgtatttacatacactcacacactcaccatatgaataaactgtcaatctaagtcattttctatggcagcctcagctgatgagagacagcaataaactctcccctatatatttcctttcagctgtgggttcctctggttgtgttgttttgatcaaggacttaggatgataccttctcaataactcagtgaaaagtcagttggaatgcaaagacaccagcttagttactttatatattaatgacagtttaagggattaataagttttgctttataagggccatataagattcctgaggctaagtcgtgttctgcaatccacagacctgcctgtgtaccttaatcactgcttaaatctttcattcataactaaggctggtaccagtttctggagcatagcatgtttttggtaccaaaatacttgaatatccttttaattgaagataatattatctgcctcataatagaagctgtggagttgcttttagacaattcttaaactttattatcattgacatttgctcatggggtatggaatatttagactaagccattttaatgaaaacatttcagttacaattatgccacagatgattatttgccatgacagtcatttccagagcaaattgtaccaaatcaatttaactccatgactgattttttaaaaagagcagccaagccacttccaatttttccattttcatttttatttcataaaattaattttctcagaatcaattctattccatttaaattttaagactaacatttgattcatcaatcaaatgtttcaatttgaattttaagactaacatttaattcatcaatcaaatgtttcagtctgaattttaagactaacatttaagtcatcaatcaaatgttacaccttggctttctgccatgggaagttgctttagtggctattatttcctctaagtctaatatgctttggttacttttatgggatataaattcatcaagaatatataattctttgatctacttttaccaatttttcaaaattcaagttttaacagttaatacatttatcttatatttatttctttaacagtgttcatcatgagttagatatgaaattgatttatgggtatacattagctaatctaagacaaaattgagagcaattttgggacaaagtaagggaaacacacaaactaagaaatatggtgactaggaaagggagaaatgtgggaagagaaaagagaaggagcactttgggaggctgaggcaggtggatcacttgaggtcaggagttcgagaccagcctggccaacatggcgaaacctgatctctattaaaaatataaaaattagcctggcatggtggcatccacctgtaatcttggctatctggggggctgaggcaggagaatcacttgaacctggcaggcagaggttgcagtgagcagagatcatgccactgcacaacaatggatgtgaatgtggtatgtattcagggtgaggtactcagtgcagccttggaggtaagcattgtacacttttggcctgtcaacgcaaaccattttttttgtagctattatatttgaacaaaactcccgtattcacagcagcttgaaatcaaggaagaagaaaccggtttgaccatcttggtttaggagagacatgagaggaaacaatattccatagtgcataataagtaacaagtaattcagagagagagaaataagcatattaattaccagaagacaactgcaaataagttttaatttgaagttgctcataattctctatacttttttgggaggaggggggtggaaatagaagaaatgcatccttaagatctatagcatatttcataggaggtgcacttttttatgagccccacactgggcacagctgcatttttgctagaaggtcatctgaaatggcatggtgtgtggcaaggtcataccatctggacctgccccgaactcactgggtaatctaaagtaagtggtgtttcctcacgaggccacagcttcctatacaaaagagtgttcaattttgagatttttctagcccttgtattacaagttggctgttttggggatgtttatatacctccttttgggcattctgtaaatgaagagagagcggtgttgacacagctttgcctttctatgtactatctgatgacggtgatgctttcatttttgagcggctgccattccttctattatcgactccagctcgtgataagtcagggggcaggggcttggcctggctgaccccggttaatgggaatggagtgtaatcacattagctcagttgagagtttggaaaattacattagctcatccaacaaaagtgaatctgccaataatttatgtgatggatttgcaattagaatatagaagccttttcttcttctttgtgtctctctgataaagaaacaaaaggaaaaaacacccgaaagagattaaaatgtcaaacagaccttacaggttatattttaatagaatttcattctctaactgttggtttgggccccctaagtaatattttaggaaataattttttgatgattattttacataatttactaagagttcttggtaaaggtagataaatacatttgaatggttattaaaagtatttgtcagagttaaacatttccagaatactgattttatctaaaattctcagaggtatatttttttgctaggtctttataatccaattatattaaaaatactacaattgaaagagtatgagatactactagtaccttgagtttggagcccttaactctgtctttgagtggagaaagtgtttaaggtaaaccaggtagggtaagtagacatttgcgtggtagaatctgccaagaggtacctaccaattaaatattaattttttgtcaataatgtgttaagtgttttgtaggtaatatataaaaagccctataggagagttgctatttcatttcacaggtgagaaactgaagctcacacttcttaaacagcttgcccatatcacataactgatagatgactgagtaaaacttcagagcctcgagtattgttctgaattctggctgtgaattaaaaatcacctatgagcttaaaaacagctatatcaatgacagcaatagcaataaagacctattgaatcatctttggggtaggagccatctttagttttcagaagacccacagatagctctgacaggtggccaggactgacaggtgtggatgagggttagtatgggcattatggacagtttctagttttggaaaagtcctagagtgtaactagcaatcataaatgaatggatctttcagtggcctttaggagatgagatatgcttgtcttctggtggtagacaatgatcagctgtacagttgacccttggacaacgtgggggatagacatgctgaccccctgcacagtcataaatctgtatgtaactgtttttttttttttttttttttgagacagagtcttgctctttcacccaggctagattgcagtggcgcaatcttggctcactgcaagctccacctcctgggttcacgccattctcccgcctcagcctcccgagtagctgggactacaggtgcctgacaccacgcccggctaattttttgtattttttagtagagacggtgtctcaccgtgttagccaggatggtcttgatctcctgacctcatgatccgcctgccttggcctcccaaaatgctgggattacaggcgtgaggcactgcacctgacctgtatgtaaattttgactcccccaaaactttatgactaatagcctattgttgactggcagccttactgataacataaacagccaattaacacatattttgtgtgttatatgtatttaagactgcattcttataataaagctagaaaaaaattattaagaaaatcataagaaaggaaaaatatatttgctattaagtggaaatggatcatcatgaaagtcttcatattgagtatgccgaggaggagaaagaaaagaggtattggtcttgctgtctcaggggtggcagaggcagaaggggtggaagaagtagaaggagagacaggaagggcggacacactcagtgtaacttattgaaaaacttctgcttgtgagtggattggagcagttcaagcccatattgttcaggggtcaactccataggtatatattgcaagttagtccctgcactctagaggcttgacaaatatttctcaattaggtttactgggagaattggagttaccttttttcttccacaaagaagaaaggtgaggaacataacctagaactctcaatttccatggaaggaaagaggagttcttccccaggagggtgagttgcagcctcctagggaagaagcagcaccacagtccctggagaaggatgaggatgtaagtggagcaagatgctggaggcagcatcacacaggtggagaatggagaaatatctgaaacacaggcaatctcagtcctcttcctctccgtggtggcagacaattaacggggagggctgtatccgcttctgtacatcactcttgaagaggaacatagtaaaactggatgactctttcagagagtgacagggagttaacggattcaaaaaagttatacattaccgaaggaatttgaattgtcccttatctcagaatggagaatagccaatgtagagggatacttgtaaaatctacaaaatatttgaagatactgttggaaaatagaacaggtaaattctgttttaccctaaggggtgcaactaaaagcaatgaataaaagtcaggagacatgaaattgttaaataaaagaaaatatcttctaagagtcagaaatagtaagactagttataagttcccagtggacaggcagggctgggctattacattattattgaagtaatagagtaactttgaacgttaattgcattttaaaactaggtggctgttagtttctctttcaacatgttaaacaacctctgacaagctctggaagggggaaatcattagtctcaggcagcataagtaatccttaagtatgagttgcctcttgtctatgtggcttatggatatacagaacgcatagcaaaatcttcttgcccagtttgggtaggtgaagaatggtatgctgctgtaagccaatattcggctgctaatcacagaggctagaaaagcaatctacagagcccaaatggggagatgattgatagattaatcaggaaagccaagagcaagtagcagtaggagtcagagatgaacagaaagtggtcagaagaattcctggaatagtgcttctgcctatgacacctttattctctgatcccaatatactttcatggataagctgggctctttgagattcagtgcaatttaattttaattcattttcatttaagagtcattcagcacttttatttatttatttttttgagatggagtcttgctgtgttgcccaggctgcagtgcagtggcgccatcttggctcactgcaacttctgcctcccgggttcaagtgattctccagcctcagcctcccaagtagctgggattacaggcgtgtgccaccatgcccagctaatttttgtatttttttgtagagatggggttttgccatgttggccaggctggtcgaactcctgacctaagataatccatccacctcggccttccaaagtgctaggattatgggtgtgaggcaccacgcccggccagcacttttatgttaatgtactttattttgccaaatggccatacagtacctaactttcaaaactgttgtatttatgcatctggataaataaaaattgctttagtgtggcaaagtagaggagtctctgaattagaagtcagaaaacataggtctgataaaaatattcatttgatcttaaattcatcatgaaaatgtgttagtgactcagttttgtcactggcaaaatgtctaaatatgactgtgaaggtccatttttcaaatttaagattacataattatgtcatatatttaaatcccttacatttaattatgatgaccactatgcttgttattgttcttaatgttctctctcaaacagcctaagactcaaagtcttggtttcatgaaactgccttggaccaggattgtaaatactaggtagagatgaattgtctgagccaattatgtttgtggcagtctaaaaaaaatagaggtgtaacccaaatgacctcagaattctttcgaagccgtgtcttgttaagataatacactattgttttttaagagaatggtgcctggaagaatttatcgtcctcttcaacagattgcatctgtcataattactttaccatttatcatcttttcaatcttttttaaaaattgtcatagaatatatctaacatataatatttaccattttagccatttattaatatacaattcagtggcattaaatacattcacaatgttgtgtaaccatcaagatgatctgcacccgagactttttcataagtcccaacaaaaactttgtacacagtatataataactctctgctttgagccattggtaacccactttgtctctatttaactactgtgggtacctcatataagtgacattacacaaatacttactattctgtgtctagcttattacctatgttttcaaggttcatccatgttgtaggatgtatatcaaaatttaatttttttaatggctggataatattccattgtatgtatagaccatgttttgtttgtccttgtatctgttaatgggcatttaggtgactcctaccttttggttgttctaaatctgttactagcattgttgtacaaatatctgattaaggcccgtctttcaattcttctagataaatattaggttgatgcaaaattgattgcagttttcgtcattgaaagtaatagcaaaaatcacaatcacttttgcaccaatctaatacataggcgtggaatcactggggcatatagtagtgctatgtttaaccttctgagaaactgacaaactattttacatagtaactgccccattttacaaaccctctagcaacgcatgagtttcagtttctccccatccttgaaaatacctgttacttttgttttttgtttttattatagccatcctaataggtatgaagtggtatctccttgaggttttaatttgcatttccttaatggctaatgatgttgaaccttttttttcatgggcttattggccatttgtatatcttctttgaagaaaatgttcattcaaatcctttggctactttgaattgaattgcttttcatgccttccatccacaaatttaatgccttttctatcttaagtaagcacttgtcatgcatggtcatgtaaattttgtagtttgaggcatgacagcaaagctagcataaaattctttttccttcttcacaatttcatagatagaagattcattcttactgtagatcataacaacctcagcatataatttttattttcttatgaaagttgagaactttcactttttcactgaaaggaagcattttacagcttctctttgacgtatttgaattgcccccactactagtcttgccctttggagccaacattaagtccaataaggtttacctgaacacaagcacgagcataagattgttatgctactcagaacatcatgcaatttaaaacttatgaattgtttatttctgaaatttcccatttactatttttgtacctccgttgaacaagataactgaaactgcataaagcaaaaccatggataaaggggaggaggggactactatacttactcaatctcattaattgtcattgttctcttcagattttctatttcttcatgattcagtcttagtagatggtatgtctctcagaatttatccacttcagttatccaatttattggcatataatttttcatagtagtcttttatgatttccgaggtatcagttacattgtgtccattctcatttataatttttcttcagctctcttttttttttccttggtgaatctagcttaaatgcttgtcaagtttatgtcttttcacaagctcagttcttagttttgcttgtcatttcagttgctttcctcatctctacttaatttatttctcttctagtcttcattggttcctttcctctgttgcctttatgcttagtttgtttttctttttccagttccttgagatgtgaagttacattgctcatttaagagttctcttttttttcttagtcatttatcactacaaatttccctcttagcacaggtcttgcagcatctcatgttttgctttgctgtgtttcaatttttcatttgtgtcaatgtatattttgatttctcttgatttcttctttgacacattggttgctcaggagtttgatgtttaatttccacatatttgtgaatttttgaaaatccctcctgttgttgatttctactgttatactactatgcctaggaaggttgagatgatttcaacttttctaaatttgttaagacttatttcgtggccgaacatatgatcactgttggagagtgttccacgtgtgcttcagaataaagtatactacattgcaatcagatagaatggtttgtacgtggaaaacatgtacaaaatgtttggtccatttggtttatagtgttattacactccactatttcctcatggatgttgtatctggacagtccattgttgaaagagggatattgaagttctctggtattattgtatcattgtctatttctccctttcattctgttaatatttgccttatatattttggtgcttcaattttgggggcatatatatttataattcttataacctgttgatgaattgacttctttatcattatatagtgatcttctttatctctcgtgacagaatttgactcaatgtctatttgtctgatgtgagtatagccactcctgctctcttgtggttaccttttttctcctttcacattcattctgtgtgtgtccttttttggttaatctgaatctcttgtaggcagcatattgttgaatctttgtttttaaaaaaatttattcagccactttatttcttttaattggagattttagtccatttatattaaagtaattattgatcggtaagggcttactattgttattttattgttttattttgtagtttgtttccttattcctctcttgctgtcttcctttgtgatttatttaatttttatagtggtattctttgaattctttctctttatcttttgtgtatctactaaaagttttttctgcttgtggttaccatggatttacataaaatatcttatatgattctaatttaagctaaaacaatttgaactcatccaaaaactaacacttttatttatctccacattttatactaataagttcacactttacctctttttatactgcgtatccattaactattttagctgtagttatttttaataattttgtattttatgttttatactagagttaaatgtgattttcacaccattgcagtattacagtattattctgaatttcacttttttttaactagtgaattttatactttcttacgtttttctgtagttacctggcatccttttgttgcaacctgagggactcccttcaatatttcctgtaagacaggttttatggtgatgaactctttgacttttgtttgtctaggaatgtctttagctctcatttttgaaggacgaccagtatttctttaaataaaccttctgatctcttctctcttctccttctggggcctccattattcatatattcatgagcttaatggtgttccataagtttcttaaactttcttcattatttaaaaaatatgatttcttttggttcttctaattgaccgattagaaatgacttgtttttcagatttcaacttctttcttctgcatgattgagtctgatatttcaactctcaattaaattttccagtcctgtcattgaattttccaggtctagggtttcggtttggttctttttaatggtttttgtttcctcagtagacttctaagttttatcatccattgttttttaaaatttcacttagttgtctctctgtgtttgcttgcatctcattgagattacttaagatgattattttgaggcctgtgagtatacagaaagatgagtttaaccaggatacatggaacatatgagaaatcccatttctccataatctcagcaatgctagatattatcaatctttaatttttgtcattgtaatagctaaaacatgaaatctttattttacttttcatttttctggactgtagtgagactgaatatcctttcatatgtttatcaactattgaatttctacttctataaattgttggttcatgtcctttggctattttttctactaagttattttctcttattagtttttaggttttatataatggacattagcatattatttgttatagctctttaccattttatctcaggctgtagcttactattgatttcaagtatcttttgctatgttgatgatttttaaattcacacagctggtcatattttcttttgagaattctgggtttatggcttgcataggtttcttctttaccaccccacctgaagtttataaagttagtctcctatattttattatagtatttttccaaatttttatttttagaacttgattattcaatcatttaatttcagtttaattttgtataaagtgtgtggtagggaatctcttattttgatagatgaatagcccgttgttcaataacttttttcactgctttaaaagtcactttatcacattttaaatttgtatacatacatgtatgtaaatatatagttacatatgacttctcttctgtgtccctttgattttcttgtgtgtcattagtcttcttttaaaattttgttggctatccttacatattcactcctccagctgagttttataatctgtttatcaattcttatgggccttggcttgcattaaatttatagattaatttgaggaaacaattcaatttttatctgagagaggaaaagaagaacacagggcatggcaccctatatatgctcgggtgagctggtcctatgggtttcaaggcattgtcaaaaaaattcctttgtaggagagttccacaggaagagagggggaagatatcgaaatcagctttcccttatccatacatttaccaaaattagacttggaggttctaaatgcagcaattttgatgaaactacctgctggaatggaaagttgtattactttcattttttcccatactgatatttacctctattgaaataaactgatgttctcaaattacttatttatttagtaaaaacaagttcaaaagagaacagaaacagatagggaaatgaggcaaaaatgctgatgtgtgggagaaggagtttacaatagagagagtaaggcaataagaatattgacaaatttttaaaataatttatattatatgtgaatgttttgggtgaaagaacccttgtgaggaaattaggccttcctataaaagaaaagatactagattactgtattaatcctttcttcatagacccatagaaggcaggcattagatgccaaccccaaagtatcagaactgaccacctacctagttgaacactgggagcaactacacattatttccatagcagcaggagtttaaggaacaactcctctaaaatagaagcactgcagttcttgagctatgctgtgagctatcaactttttctttcattttctttcctgtggtgttttttctttcttgctttccccaaaaaagaaagagaaataaatggttagaattaaatttctttcagcagcgtgcagaactgcagtgttgatacagaacctcatttctgttggggctaatagtaaggagctatttttagactggatctacagtttccttagtaacaagggttgaaagagctctgttctcctgctcgaaatatccccagccagtagttttgcccttgattcctctaactttggaattcttctcaagtgttcataggttcagtatcattttcttccaccttcatgtatttcatagttggagtcctttcattaatatttaccaatccaattgtgtagtatattttgttttgatgataatgtgctttgttgaattgggggatatttcattttgattgctaagctttgtactgcagcagctaaggtctatgcttaagtttctcaggcattgagatttataagctttctcttatatttcatatttctgggcattgtccagaatcccaatcttttcctttaagcatttttttcttccctttatgtttgttctctttttcattccctccagcttgaccatctgtctccctcttattgcttccgcagaaccatgcactaagtacctaggggtgaaatggcacatgccatcaaaagattcagtttacagaagtcatcactgatctatgataagtacagaaggacttctccaaagtactctacgtcttgtcaccatctgggcctgttccctcacctagttagaacacagcaaatgaggccaaggtcacagattcagaccccatacgattcagttcactttacacaaggaagaactttgttttgtttccatagtctgcaaccgcatatgctggtggacccaacttgaaaatgaattcatgctggaggacctagtgagagttgggttggagccagcccctcaatattatcatagaaaactcaaaagcatatgttctgggctggatactcagcaggactcttccctccatgcactctttatgttaaactttggaatagataagtcgtgaacaatcatctgttctaacttgtggtcccacagaagaaaataaaaacccaatgcttggtcccgtgctctgtgtcatttgcctcactattcatttttcctagccacacttctataaagtggatctccatggagttacaaattttacagatgaagattaatggaatggtgcaattaaacctggtgaaatgagctgccttatgtaattgggaagagagttgccattagttaaatataatatccgataactttagtgagcagaaactttgagcatcttctttatttggcttgtgtaatagtagtaaaatatttgcaggatgatttaagatttacagaccatttccatattccccatcttatttggttcatccaacatgagtttggcttgacaggtgttatatttttcagattagaaaaaattatgtatgagattgcatgacttactgatgattacataatttataaagtctttgaactcagatccagggagctttccatgatatcacactacatttcatttcttgacttgtacctacagaaatatttcaacagaaatttgattatattgttgacactatttctattttatttttgatttgattagggatggcagatttcatacaacttctatagttgcaattacacccaaaatcagatttgtgaaactttgatataacctcagaaggagttagaatagctggttccaaaggctcgttccacacaaagcacttttaggtaggtcatctgacatgacagttgacaataaagtttctgaaaatagatttgctttcaaatcctggcttgaccttagtttattcctcaaacaattctaccctacctgcttgggaaataaccttggcaacagtctttctaacaccaatttgccaagttgtgtgctagctctgctcagaattgaaattcaaaagtaaaaaaaagattaaaggaattttagctcagaatcctgggaacaggaaaaagcaagatgttcttagtcttttgtcccccaagaccattgcacttgaattgtgtgatatttctgttccaattaaagggatgccttacgttcaaggggtctaatttacattttcctgctttgcaagctataacattattttatcttagtttttacaacattacataatgcattgtgtcttgatgcaatttaatgcctcctgctgactattcaaaattgctaagcagaaggtcagaccagatcagtgaacagctattaaaatgcataggcggcaacacaaacagtagataattagcacttaatgtaagccaaagctgtgtgaaatgtgaagaaaaaaataacaaggtgtttccttaattctgtgagtgcatcttccattcacattgctggctgtggctttagatccatcatcaatttgcccttttgaaattggtttgttttacttcttgtgaaatattttacacatacagaagagtagatagaactcatgtacagtttaaaaaataattacaaagcaagcattgtgaaccactcagaccaagtagaaatctgctattgttgttctctacagtccgaacagaatcttccctctcctgatgcaacatcaaccaatgaaatttaccataagtccctgcgtatcgctatagattttatcttttcaatagtttgcccactaaaaattttaatttcattttgtctttgaaatgtacacaaataaatcataaaatgtttttcttctgtgattgctactttcattcaatgggatatttgtaagattcatttatgttgatgggtgtatttatagtttgtgtatgtttatagatgtataatattaatatttaatttctgtattgattctatcttgatgcccttggattatttccagttttagagctattttgaataatactgctatgaatatatctctatctcctggctatgtactagagtttctccagagtgtatatttaggtgtaaactgttacatggcagggcatgcatagtttaaatttcccagatagtgccaaactatttccacagtatttgtaccaatattcactcccacaagagagttccaattactctattactaaaacttgaaactatcagatactgcaattttggccaatctaatgagtatttagtggtttttcattgtgtccttaatttggatttggatcaactaatgagttgatcatgtctccttttataggagctgtttgggtatcccatttgggaagagcttattcaaatcctatgcccattttcttacagttgaggtatttgacagattacaagaactttttatttgttttgtataggttacatgttatatgtattatttagagcaatgatttgaaggagatgaaggaattcaccatgggaatatctaagtgaagtgcattccaggcagtgcaaaggtcctagtctagaagtctgcttggagcaccatagtaagagataaattactagcagattaagtcatagggataatggaaaggaggccttgtaggccttatagaaatctttggctgagattctgaataacataggcagtgactaaaattttgagcaaaggagcgacatgacctgactcctcccctccacatttaaaattaatagactttatttttttgagcagttttaagtttagagaaacattgaatgaaatctaatgtcctgttggaagagtctctgcttcccatccctgcaactgtgggttctgcaagattggagaccttggcaccccaaacaagccatactcttgctaaagtatgcaagaggatcttattgaactacatgctatatatgctgccagggcatattggattcctttatataagggccaggtaaaaagaagagtaataatcttggaaggggtgattgatcctgacagtaggaagaggcaggtctgcttttacacaatggaggtaggaagaaatagctgtggcacccaggctatatgcttggatgcctcctagtgcttccttgccgaatcataactatgaatgaacatgtgcagcaacccctgaggatggtaagattaccagggactcagatccttagaaatgacctgcataggcattagctgagaggagggaaatttagagtgaatgatggaggagatgatgggtatcaattgtggacctaagaccaactgcaacaacagggactatagtttatctcgctaagtttacccaaaggaaagaaggtcagtggaaccatggcatgtgtggaggtgtggatctgtgcagagcaaagctgggctatggtggccatggagatttgctgctcaatctctgttcaagcaaatcttctgtagggagcataggtagtcagtcacttccagctataccttcagatgcaacatggagctcacactgttcccagcatgatggggttatgagaattgggaaatttctgcttctaatgagcaacctttcctcagtgagcctccattagcctggctgtgatagtctcagaagtgtgtgatagtctgaggctcttcatactcaattctcctttcttctttctcttctttgacagatggcaggcctacattgtaatcaaaagcttctcccacctatccaattgtcttcccttgctccttcacacacatttcccccaataaatctcttgctcatcctaattccaacttgacatctgtttctgggaagacataatctgaaataaggcatgtttaatgtaattatcaacatggtctaatttaaacctaccatcttgctatttcttgtctatttctcccatctgcttttccttccttcccctccttcttttggatttagtttttttaaaaaaagactcgtttattatctctaccttgctttattttttggcacttgaaaggtagggtttaactttcaagcaatgctattccacttcacatatggtgtaagaaatgtacagcagaacacacccaattcttccctcctgtcctttatgctattttcacatttatagcacattttacttctgtatgtgctataaacctcaaaacacattgccattatttttatttgaaacaatcaaatatcttttgtggagactaaaaatgataaaatgtcttttatttttatacataatatatatgtttactttcgccagcattctctattttgtgtatatccaatatccaactattttccatctgccttaactttccgtaatatttcttatagtgaaggtatgctgctgatcaatagtttcagattttgtttgtctgaaaaagtgtttatttccccttcatttttaaaaagttgtggtaaaatacacataatataaaatttatcattttaacaattttaattagtttattcaaccattaatctgttgaagaacattttgggtatttccagtttggggctattatttaatacaaataaagttgctatgaaatttgtgtacaggtttttgtgtaaatgtaaattttcttggattacatggtgagtgtatatctagttgttttaaagaaactgtcaaattgttttccagagcggctacatcattttactttcacacaggaaggtatgagaatatatgtatcctttgcatactctccatgtggtcttaatttgcatttccctaatgactaatgattctgaatatcatttcatgtttttattttccatctgtatattctcttagtgaaatgttgatatctttttcccagtttctaattggactgatttctttttttcctgttgcatttttagaatttaaaaatatattctacatatgggttctttgaattgagttgtagtttgcaaatgttttctctgtctgtagctggtcttttcatcctcttaacaaggattttctcatgataaaagctaatttggatgaagcccattttattaatttttttctattatggattatgcttctgatgtcatgtcaagaactctgtcaagccttagatctcaaatattttcttttatttgtcaaaaacatttattctgagaatctaaaatctgttcaaagactattggactttagaaaaagcctccacaaaattgtcttatttcttccctaatacagtaataatctaagaataaggaggtaaaaaaaacccttaaaaaataacattgctccagtttgtctgcaggtatgtgattcttttattggtataattatcttttctgtttttacaattttcatgtgatttcagaaaattttggccattacttaaatattttcttctctcctcttttctaggactgtgatacatacatgaaatcacttgattttgttccatagtccctgaggcttcaagttatttccttgattgtgcatccatttggatagcgtctattgctatatctttaagttcttggatctttttatacaatgtttaattggttgttaatcctttgtcatgtattttcattttaaagct

SEQ ID NO: 567 - DNA, 525 bp, Homo Sapiens
gctggagccgggccggggcgatgtggagcgcgggccgcggcggggctgcctggccggtgctgttggggctgctgctggcgctgttagtgccgggcggtggtgccgccaagaccggtgcggagctcgtgacctgcgggtcggtgctgaagctgctcaatacgcaccaccgcgtgcggctgcactcgcacgacatcaaatacggatccggcagcggccagcaatcggtgaccggcgtagaggcgtcggacgacgccaatagctactggcggatccgcggcggctcggagggcgggtgcccgcgcgggtccccggtgtgctgcgggcaggcggtgaggctcacgcatgtgcttacgggcaagaacctgcacacgcaccacttcccgtcgccgctgtccaacaaccaggaggtgagtgcctttggggaagacggcgagggcgacgacctggacctatggacagtgcgctgctctggacagcactgggagcgtgaggctgctgtgcgcttccagcatgtgggcacctctg

SEQ ID NO: 568 - DNA, 298 bp, Homo Sapiens
cggagattatctgctcgagtgggtttaaggttctccccaaaatgaggtaccaagtggagcacggagagccggccagactccagtaaacagtgtcccaggacgagaagtccgatcagaccagtttttaaaaatcatataaagttagtgtaaaagtatgtgaagccaagttgtatagggcgtagaaagcagtatttaaaaatcgcctgctggaacagctcccgagcagactcgctcctcctcgcccaagaaatccagatattccctttttttcttttttgatggtgttcccggagcggca

SEQ ID NO: 569 - DNA, 474 bp, Homo Sapiens
  misc_feature (413)..(413): n is a, c, g, or t
gctgatataagtgccacctccatatgtcaagctgcatgtcagatggtacgctgggactagttgattctctgtgacttgccgcaaaagttccttgccacagtaatcccttgtttcccaagggtgatgtagatcatcctatgtgacagtaacaataggctaaaaacagccaaaggacttgaaagcgcttttttttcccatttttttttcctagagtgactgaataatgagggcaaaatgggtgtcagtgggcatgaaatgaatgaatgccatttgcaccaacctgttttagatgaggagggtgggacctggtgaggagtgaccactgggtgagcattctgtgtcaatggatttccagctcacattggcagcgatttgtacattatttcatcccattcctgtgtgatccatctganaagccgcgagacagaagggacacacattcattttgggtgtcaaagatctgggcttcagtcc

SEQ ID NO: 570 - DNA, 636 bp, Homo Sapiens
tggcacgaggctgaattatatatccaagcttttaattctgttattgccctttgaaggatgatcacttttaaagtgttttttcctccattgggaaatttgtctgcttttggtaaattttcatagttcaatttgagtatgtatattatttttccatggaatactgagggttttatgcttttgaagaaatgatttaaagtttaaaatttctttctctacattgatctgctggttttaattctttgaatagcacttatgatcatttgatgctgttctcttttgctacttgattattcatctttctctccttagaatgtaagttctaaaagggcagcacatgttcttgatctttgccaaatctgtagtgtctcctgtagtagaacagatgctcgataaatatttgttgagttaatgaatgaacaatttaaaagattgtgagctgggcgcggtggcttacgcctgtagtcccagcactttgggaggcctaggctggcagatcatgaggtcaggagatcgagaccatactgtctaacacagtgaaaccccatctctactaaaaatactaataaattagcggcgcatggtggcatgcactgtagtttcagttacttgggagcctgaagcaggctaatggcattg

SEQ ID NO: 571 - DNA, 512 bp, Homo Sapiens
agcggccgcgggggcggcggaggatatggagtaaagccagagtcagtggccaggcacgaaggcagagcaggaacagccaggaggcgtttattaggggggcggggggaaagagccccagcaccgcccctcctggaagaaggaagaggtaactataactacccaatattgcagccatggagtccatgcttaataaattgaagagtactgttacaaaagtaacagctgatgtcactagtgctgtaatgggaaatcctgtcactagagaatttgatgttggtcgacacattgccagtggtggcaatgggctagcttggaagatttttaatggcacaaaaaagtcaacaaagcaggaagtggcagtttttgtctttgataaaaaactgattgacaagtatcaaaaatttgaaaaggatcaaatcattgattctctaaaacgaggagtccaacagttaactcggcttcgacaccctcgacttcttactgtccagcatcctttagaagaatccagggat

SEQ ID NO: 572 - DNA, 595 bp, Homo Sapiens
gccccaaacgccagatagaactctgaccagaactccaggagctctcccaggcatctcggatcacgggcatgtactcgtgtgtctgagtctcccttcttcagccccatccacctacactcaaacgtggcgtagacggtggaagatacagtggacagtgctcctcccgggcagagaaagaaggagcaatggtacgctggcatcaacccctcggacggtatcaactcagaggtcctggaagccatacgggtgacccgtcacaagaacgccatggcagagcgctaggaatcccgcatctacgccagtgaggaggatgactgagcctcgggatggggcgcccaccccctgccctgccctgaccctcgtgggaactgccaagaccatcgccaagcccccaccctaggaaatgggtcctaggtccaggatccaaggaaccacagctcatctgccaacaatcccaccatgggcacatttgggactgttgggttactacgttaccgtttctatcttcctttagaaatgtttctgcctttggggtctaaagcttttggggatgaaatgggacccctgctgattctttctgcttctaagaactttg

SEQ ID NO: 573 - DNA, 465 bp, Homo Sapiens
  misc_feature (383)..(383): n is a, c, g, or t
ggcccgcggggcggcggcgggaggatgcctcgcgccctgcctaggcgttaacggcctcagcgcgtcccgggccgcgccgggaacgcctgagagccgagcccgcgctgaccggggcccgggccggatgggcgctgcgggccggggcgcggaccgcggagcggccgttacgtttttctctcgtcccagctgtgtggacagtgccacacgccctcctggacaacgacggctcttgcgtgcattttccagtgttgcttttgtcagagaggccagcagagccacggttcttccagaaccagccctgagctgagtgaggagtgcccaggagagatggtgaaaatgacaaagtccaaaacttttccagcgtatctgccgaactgtcaccnaacgtacagctgtatccactgcagagcacacctggccaatcatgacgagctcattctccagttctttcaagggacccagggc

SEQ ID NO: 574 - DNA, 606 bp, Homo Sapiens
  misc_feature (536)..(536): n is a, c, g, or t
  misc_feature (573)..(573): n is a, c, g, or t
  misc_feature (594)..(594): n is a, c, g, or t
  misc_feature (599)..(599): n is a, c, g, or t
ggcagcagcagcgcgggggagcctggaggagcagagagcagctcgtccccgcacgcccccgagagcgaaacccccgagcccggcgacgccgagggccccgatggacacctggcgaccaagcagcgcccggtcgccagatcgaaaatcaagttcaccacaggcacgtgcagcgactcggtggttcacagctgtgacctgtgtggcaagggcttccgtctgcagcgcatgctgaaccgtcacctcaagtgccacaaccaggtgaaaagacacctgtgcaccttctgcggcaagggcttcaacgacaccttcgacctgaagaggcacgtccgcacacacacaggcattcgtccctacaaatgcaacgtctgcaataaagccttcacccagcgctgctctctggagtcccacctgaagaaaatccatggggtgcagcagcagtatgcctattagcagcggcgggacaagctctacgtctgcgatgattgcggctacacggaccccacccatgaggacctgtacctgcacgtgaacagttngccatccggcagctcgtttctcataaagacatctaanaaactggcagcctttctgcanggcangctgaca

SEQ ID NO: 575 - DNA, 264 bp, Homo Sapiens
agaaagctaagaaaacttggtatacatttacaatggaaatataattacactttttactctcagaatattgttcacattagacttcctgtttatcttttatattcttgcatttatataatgcctcatcctttcaaagttctttcacatattatatgatcttctttatgaaaaaaatagatgtttcattctgatatattcagtttcccactttaggcaaaagtagattaatagaatgacgaattcaaagtagatgaggataatcag

SEQ ID NO: 576 - DNA, 1165 bp, Homo Sapiens
gctgggagtagagggcagagctcccaccccgccccgcccccagggggcgccccgggcccggcgcgagaggaggcagagggggcgtcaggccgcgggagaggaggccatgggcgcgcgcggggcgctgctgctggcgctgctgctggctcgggctggactcaggaagccggagtcgcaggaggcggcgccgttatcaggaccatgcggccgacgggtcatcacgtcgcgcatcgtgggtggagaggacgccgaactcgggcgttggccgtggcaggggagcctgcgcctgtgggattcccacgtatgcggagtgagcctgctcagccaccgctgggcactcacggcggcgcactgctttgaaacctatagtgaccttagtgatccctccgggtggatggtccagtttggccagctgacttccatgccatccttctggagcctgcaggcctactacacccgttacttcgtatcgaatatctatctgagccctcgctacctggggaattcaccctatgacattgccttggtgaagctgtctgcacctgtcacctacactaaacacatccagcccatctgtctccaggcctccacatttgagtttgagaaccggacagactgctgggtgactggctgggggtacatcaaagaggatgaggcactgccatctccccacaccctccaggaagttcaggtcgccatcataaacaactctatgtgcaaccacctcttcctcaagtacagtttccgcaaggacatctttggagacatggtttgtgctggcaatgcccaaggcgggaaggatgcctgcttcggtgactcaggtggacccttggcctgtaacaagaatggactgtggtatcagattggagtcgtgagctggggagtgggctgtggtcggcccaatcggcccggtgtctacaccaatatcagccaccactttgagtggatccagaagctgatggcccagagtggcatgtcccagccagacccctcctggccgctactctttttccctcttctctgggctctcccactcctggggccggtctgagcctacctgagcccatgcagcctggggccactgccaagtcaggccctggttctcttctgtcttgtttggtaataaacacattccagttgatgccttgcagggcattcttcaaaa

SEQ ID NO: 577 - DNA, 467 bp, Homo Sapiens
gtctcctagcaacaagttgtaccatatgaggacggccgctgagccataatggagatatcaatgcctccacctcagatatatgtagaaaaaactctggccattatcaaaccagatattgttgacaaagaggaggagatacaagatattattcttagatccggattcaccattgttcagagaagaaaactacgcctcagccctgagcaatgtagtaacttttatgtggaaaagtatggaaaaatgtttttccccaacttaacagcttacatgagttctggaccacttgtcgccatgatattagctagacataaagccatctcttattggttagaacttttgggaccaaataatagcttagtagcgaaggagacacatccagacagtctgagggcaatttatggcacagatgacctaaggaatgcacttcatgggagtaatgactttgctgctgcggaaagagaaatacg

SEQ ID NO: 578 - DNA, 330 bp, Homo Sapiens
  misc_feature (11)..(11): n is a, c, g, or t
  misc_feature (14)..(14): n is a, c, g, or t
  misc_feature (54)..(54): n is a, c, g, or t
cattgagattnagntttcactcggtcaccgaggcctggagtgcagtggcgtganctatgctcactgcaaccaccgcctcctgggctcaagcgattctcccgcctcagcctcctgaagagctggaactataggcacgcgccaccacacccagccaattttttgtactttaagtagagacggggtttcaccatattggccaggccggtctcgaactcctgacctcgtgatcattggctaagtttagcccagttttgctttccccttcgacagaacagcactgagttcaatggagggtctcaatcacagcactctccctccctgacatgcaga

SEQ ID NO: 579 - DNA, 574 bp, Homo Sapiens
  misc_feature (289)..(289): n is a, c, g, or t
  misc_feature (312)..(312): n is a, c, g, or t
  misc_feature (436)..(436): n is a, c, g, or t
  misc_feature (443)..(443): n is a, c, g, or t
  misc_feature (474)..(474): n is a, c, g, or t
  misc_feature (494)..(494): n is a, c, g, or t
  misc_feature (539)..(539): n is a, c, g, or t
tactttcttctagccaacttgttttagaaaattaagactctttttgatgactcagactgacaaaaatggaaaactttgcctatgtagactaaagaatgcctactgcctgagaaaatgcagacctaattgttggtttattttctcctccttaccccaccctgctctctctttttctctctgggtatctcaccagaactctctgtcattacatctccttctcttgcattccttttctttctcattctttctctctctctctcctgcgttatctttgtgctctcactctctntcactctctcccgcgctctctcnctctctaagacaaatgcctctacctagcagaagtcagttggggtgggctagtgcatgggtttccaaatggttcagcagagatgaactggggggaaggtaattttggcaggaatttgaaccctantgtgggnaataatggtaatttccccttaggcaatcagnaaaaaactggggaaatttangtggacttggaatcaaccatggacacaggtataggcatttggcanggtaattggttcaggggactttaactaggatggaa

SEQ ID NO: 580 - DNA, 2317 bp, Homo Sapiens
aaaactccaggaggcggaggaggctagtggcagtacctgggcaccctgaccctccccacaggccagagcccaccctcctgctcatgagggcagacaggcctttccagggacacagtccctcttctccccaggaccccagggccaactccccctgccggccctctgccatcaaattggcagtggctccaggggagtcccctggggatgggggaccactgttggggacccctctgcgtgcacccctgtagttggggaagcaggacaggggcctggggagacggaagggcgccaggggttgagagaggatggtggacgttgttggacttgaaagggaaacaggccctcggggaagcccctggccaggcctgcctctcccctccctggtgggcccagcgcccctgctcacttgtctctgcccacagtgcctgtctgtggaggacgccctgggcctgggcgagcctgaggggtcagggctgcccccgggcccggtcctggaggccaggtacgtcgcccgcctcagtgccgccgccgtcctgtacctcagcaaccccgagggcacctgtgaggacgctcgggctggcctctgggcctctcatgcagaccacctcctggccctgctcgagagccccaaggccctgaccccgggcctgagctggctgctgcagaggatgcaggcccgggctgccggccagacccccaagacggcctgcgtagatatccctcagctgctggaggaggcggtgggggcgggggctccgggcagtgctggcggcgtcctggctgccctgctggaccatgtcaggagcgggtcttgcttccacgccttgccgagccctcagtacttcgtggactttgtgttccagcagcacagcagcgaggtccctatgacgctggccgagctgtcagccttgatgcagcgcctgggggtgggcagggaggcccacagtgaccacagtcatcggcacaggggagccagcagccgggaccctgtgcccctcatcagctccagcaacagctccagtgtgtgggacacggtatgcctgagtgccagggacgtgatggctgcatatggactgtcggaacaggctggggtgaccccggaggcctgggcccaactgagccctgccctgctccaacagcagctgagtggagcctacacctcccagtccaggccccccgtccaggaccagctcagccagtcagagagatatctgtacggctccctggccacgctgctcatctgcctctgcgcggtctttggcctcctgctgctgacctgcactggctgcaggggggtcgcccactacatcctgcagaccttcctgagcctggcagtgggtgcactcactggggacgctgtcctgcatctgacgcccaaggtgctggggctgcatacacacagcgaagagggcctcagcccacagcccacctggcgcctcctggctatgctggccgggctctacgccttcttcctgtttgagaacctcttcaatctcctgctgcccagggacccggaggacctggaggacgggccctgcggccacagcagccatagccacgggggccacagccacggtgtgtccctgcagctggcacccagcgagctccggcagcccaagcccccccacgagggctcccgcgcagacctggtggcggaggagagcccggagctgctgaaccctgagcccaggagactgagcccagagttgaggctactgccctatatgatcactctgggcgacgccgtgcacaacttcgccgacgggctggccgtgggcgccgccttcgcgtcctcctggaagaccgggctggccacctcgctggccgtgttctgccacgagttgccacacgagctgggggacttcgccgccttgctgcacgcggggctgtccgtgcgccaagcactgctgctgaacctggcctccgcgctcacggccttcgctggtcttacgtggcactcgcggttggagtcagcgaggagagcgaggcctggatcctggcagtggccaccggcctgttccttacgtagcactctgcgacatgctcccggcgatgttgaaagtacgggacccgcggcccctggctcctcttcctgctgcacaacgtgggcctgctgggcggctggaccgtcctgctgctgctgtccctgtacgaggatgacatcaccttctgataccctgccctagtcccccacctttgacttaagatcccacacctcacaaacctacagcccagaaacccagaagcccctatagaggccccagtcccaactccagtaaagacactcttgtcccttggaaaaaaaaaaaaaaaaaaa

SEQ ID NO: 581 - DNA, 357 bp, Homo Sapiens
cttgacagttgtagggtatgcgggggaatcgatgatccgggagtcccctgcgtggatgtcgtcccggcaccaggacgggaccgattgctgggtccagtgtccccagaattgcggactgcgcacacctggaaggacccgaagtcccgtgttatagttgagaaactcaagactcagacaagtgaaacgactttggcttcatgacagctggaactggaacccagttcccttttagactatggcgagcagtacctggagttcagtccagcagaatgaagaacgggatggtgtgcgtttgagttggaacgtgtggacttccagcacggctggaggctacaagaatggttgtacccctggcac

SEQ ID NO: 582 - DNA, 255 bp, Homo Sapiens
ggcacgaggtcccaaaagccaccccacaagcctgagccaacctgctgcctgacgccacagtcattggcagaggtctgggcattattaatttataaaaatccatgctttacacctggacagtagacagggacttcagagattgcacgtttgaatacattcttccaagactgaggttgttcggttttaattcctgtagtccaatcacacaatttcttatggaaaccttttgtgtttctggtatttaatacttgaagg

SEQ ID NO: 583 - DNA, 329 bp, Homo Sapiens
  misc_feature (207)..(207): n is a, c, g, or t
gcggcgcctactactactaaattcgcggccgcgtcgaccttcttcccaggtgatctctttcttctggatttccttttccacatctttgttttgatcttcattgttctgctttgcttcagatgtgtctgctcttgcctggttacaggagatggccagttcaggatccatatctgccattgctaggagtcttagctaaggtcaccctgngaatttcccctacattcggttgctagcttgtcctggcaatgcccccccccaattccagttgtctctctttccatcccccccaatatgatccctcctttttctatttgttcactctccacttt

SEQ ID NO: 584 - DNA, 430 bp, Homo Sapiens
actttattcagaaatggtccgttacaatcctcttccgtagagtttgactctctttaaagtctatgctggacagggcatcttcctgggtccctagctttgggggagggtaattcctgccaggaagctggttccaccagtcctgctgtagctgctgtctgccctccaggaccaagaaaggacaggtattctcagtacattatccagctcttcttaagaggacaaccagtaaaggcttcccaaggtgttcctacagttctccctcaactcctaggaaaacaaaggttcaggcccagctctgtcacttcgtattcccttcttgataatataggtactccataagccccagcccacagtcatctggcagaggatggagtggaggacataatacccaagatacccaaggggctgcaaggtaaagggtgggtagcag

SEQ ID NO: 585 - DNA, 892 bp, Homo Sapiens
gcgcgccagtttcaggatgcagggtctaggagaggagccgcaatcgtgtctggggccccagccaggctggccggagctcctgtttccgctgctctgctgcctgcccggggtaccaacatggcccagaagcgtcctgcctgcaccctgaagcctgagtgtgtccagcagctgctggtttgctcccaggaggccaagaagtcagcctactgcccctacagtcactttcctgtgggggctgccctgctcacccaggaggggagaatcttcaaagggtgcaacatagaaaatgcctgctacccgctgggcatctgtgctgaacggaccgctatccagaaggccgtctcagaagggtacaaggatttcagggcaattgctatcgccagtgacatgcaagatgattttatctctccatgtggggcctgcaggcaagtcatgagagagtttggcaccaactggcccgtgtacatgaccaagccggatggtacgtatattgtcatgacggtccaggagctgctgccctcctcctttgggcctgaggacctgcagaagactcagtgacagccagagaatgcccactgcctgtaacagccacctggagaacttcataaagatgtctcacagccctggggacacctgcccagtggccccagcctacagggactgggcaaagatgatgtttccagattacactccagcctgagtcagcacccctcctagcaacctgccttgggacttagaacaccgccgcccccctgccccacctttcctttccttcctgtgggccctctttcaaagtccagcctagtctggactgcttccccatcagccttcccaaggttctatcctgttccgagcaacttttctaattataaacatcacagaacatcctgga

SEQ ID NO: 586 - DNA, 225 bp, Homo Sapiens
tctagaggatccgtgcaccgtacttactcggtgactgagatgtaagctatgcttttcccaccagaaatatggaagtttaacctgaagaacagactctggagctggactggtttgagccccacctcctaacttatctcctgtaagttattaaactttctgaactagtttcccatttatggaatgaaaagaataatactcactgcaaagggagaaagtacggttgca

SEQ ID NO: 587 - DNA, 459 bp, Homo Sapiens
tgtagtaaaaagtgctatgtttatatgtgcatacatatatgggctctggcaagggatgcatgagtacatgcgtgttatgtaaacatagcaattggtcagaaagagagtttctcatcattaggacatttaaggagtggcaagcatattggaagcaagaatgacctagggccatattggcttagttgtcagccaggagtgttgctgttcctatacctggaggtgcccaggtctctccccaagcaggccagtgctcacctgatatgacaggtgatcgtgtatctgaggcctatgagtttgagattcccccaaggtgaggtgggtctgcactcacttgctaccaggtagctcccctagttcttgaacacgtgtatggcccagttctgctcctcatgtaaaaagcagaacacgatctccctgtctctaggaggagggtgcagattgcagatttatggaggccca

SEQ ID NO: 588 - DNA, 140 bp, Homo Sapiens
tagattaaagatgtacagcactggaggtgtaaacctggactgttgtgttaatggatttaatgggccagagtgggggcaaagaaactagcacggttagataagctgccaaggagaccaggtatatcatcaactagccgtgt

SEQ ID NO: 589 - DNA, 603 bp, Homo Sapiens
ttttttttttaacatattaccacatccaacttctttattcttgagaaaacaaaaaagtccaaaatcaaaggaaagcacccgttttaaaccctcatatctttctcagggctcactgcagtctggccatatctcaagcaggtctgtccaatggcttggaacatagacttttgcagtgaaactttaaaaacattacttgaattaggattacacaaaaaaaactaaattctaagtgagcacaactatcgctgagaccctgaaatttcaggaaataaacatggttcaaaactcaaactgttcatcaaaataattacgcaggtcagccaccactgcagaaccatcactgctcagaggaattgagtcagcaatgactgatctcatcatctcttcattagcacataagcggttcaacttgggatacgcaaggagtctctgcagaggtacgaaaaatttatctccaacacagaagggtgtgggagagttctctatcttggccttctcaacctctgtgaagactggtccaaagcatgggacaggggcctttgagccaccaatgtctttgggcttatcaccccgttccccagcctgttctttccgccttggcag

SEQ ID NO: 590 - DNA, 166496 bp, Homo Sapiens
gatcatttgaaaattccactcagatttggaagaaaaacattccagattgattactgatgtctgccattcagaggggaaagggaaatgatggcatctgtgctgtgcattgtcatcctgggccacccaatgcaaccacatgcttgctcagcaaagggaaaactccacagagctgagctcctggtggggcaacatggtggcagatagatgggtcaattggaagccccaagatttttctgtttctccaaagtaaaatgtccatgctcttacatgtctttcctagatggcagaggcaaatgcaaagcaggaagacaagggaagataaatgccattggctttagccctaaatcatgctgttcactcagctttttcttgagttgactccacatgtctacctgtgaccagtggatcagtgcttcagatccatgaatatacaatacttcaggggttatccagttttataccccaccttgcacctcgggcaggcaatggggagccaaccagaccctgactacacacaccacaccctgtgatggatggtgaagagctcaaggtggccaacagtgggctccaggtgcctctcaggtcattccacatctatctcacgacctgagccagtaaggggcatggataggacctcagacaggacttctgtgccaaccccaaagaaccagccaggacatgcctccgggagaggcgtttgcatttgggtagaacactgcctgatgattgagaccacctgggctggaaacaggacagtcacacaaatgcctggcagggcaaggggagcataggagcctggcatgaaggagaaagggtcatgtacgtggttgtgagggtcctccctggcaatgccccggcctggggtctggctgggtttgagggtttcctgcttctgaggggcccgatccagatgagaagggtggctgcagctgggccgggcgggtggactcagtggcagccgcaggccttgaccaccatgttgcggtgcttgcgcaggatgacattgttgctgctgtcatagtagagcacagaggtggcgctcagcttggtgggtgcacagcacgccttggggactgcgtctggcatcatcaggtgcacctggccaggaagagggcacaggcaggggcatgagcccagtggcctcctccaaggacccacccagccccaccccagctccacctgctccctgccctggccatctccaggccacatgggagcagcacaataataataactattaacaggaataagagcagtcctcaaggctccaggagtgggagctgtagtaacacgcagtgcccagggagggacacatggcagggggtgtgcagcaggtgggcaaggcgctaatgaggggcctggagtcccaggccaagggctcagacttcctcctggggataatgggaaggagaactgtgtggccaggtttgtgcccttagtgaggtccccaagggggagcctggaaggaccactttcttcttttggcccttcggacccccagaggctctgcctcccacaccctggcctccctccccagtctctgggaggccaggcctccgcccctctcctgtgctgctccttcccccagaggactgcatccgccctcagcacttcaaggccctgcacgtgcccgcacctctccactccccaggctcagcttggacctctcttctgaactccagacttgtggatcctgctcccctcgccacttctgcacttggggtctaatggggcctcagcggaacatggagttcctcccgccctgacatcatagcccccgcctgggaggcctcctggatgactcctcttgcctcctcccttccctgggagcagcccctggctcaacctccacctccatgctgccttggaccacctgccccgtccagctgccatcacctgtcaggtgaccacagcagccttcactcatcccctgctcctccaccttccaccaccacccccacccccaatcccagcctcccccagcagccagagagaggtccttctggagggtgacatggaccagaacactgctttgctaaagagctccgacagcctcttgggttacttggaataaaacaccttcattcagacccccaggccctaggggagccggccctgcccaccctggtgtcacctccctccgccctcctcccactcactgcacccagccccttctccctgctggccctgaacctgccaagctcactgctgtcttagggccttggaattgctccttctgctggaacattcctcctccagctgctgactggccccctccttctgtggagaggccaggcccagtctctccccactgatggagcagccactctgctcttcctcacaggaggcgtcacctccacggttgttttgctttggacaaaccaacaaaccgacagcctcccctagagcgcagcgcctgtctgtttgctgcccagcaggttacgagtgctcactttagttgagcccctgaggggcaggggcaagggcagaggagatggagtctgggagctgcagatgcagtcaccttcccgcgtgcctcccacacatgcagccatgagaaccacacggcataaagggtggctgggctgggccgccccacgcgtcctcatcatccctgggcctttccaaggaggtggctccaggtgtccagcaaacaccatttgactgcccagaaaggaagcattatcataggctcagagcagcttttggtaatttatttcctctcacaccaaggcatagtgtgcgcacgtgtgtgtgtgtgtgttttaatttttattttagagacagggttttgctgtgttgcccaggcttgtcttgaacttctgggctcgtgtgctgcgattacagggtgagccaccgcacctgatcaaggcatcaccgttgaacctcctaaggggaaaacataaggctgtgcaataccaggaactgggattctaggtaaaaagttctagaaggaagcctcggtgccagaatccacaaacacacagagcactcaacagtgagcagcaccagtgatcccatcagaaacctgcttttgtcctttaaggttgccccagataccaaggcatcaaaagccaggggatccagaaaaaacaaagatggccaagagagaaactgggggaaaagccaaaaggttgagagccacaccatctagaagcttcctgcctgcggtgcggcacaggtgggtgagtgcacacgcacaccccacacactgtgcacacatatcacgggcggtcagacttgccagcgtactcggcggcccgtgtgctaagatcacacagcccccacacagtgtacacatctgtttcatgtgctgtgcctctgagcgctgcacacaggtgcgtaagtgtcccacaggagtttgttcggtgcatagaacaggcatgtgtacacgactgttcacgtatgtccgtgtttgggtgcgagtctacgtgtagtgtggctgtataaggaccagttcctgcagagctgtgggaagttagcgacgttactgactgtgcagacaaagccccctgagacgcggagcaggtggcctcactgccctcccagccagctggaccagacccctctccacagggccccccaccccagggggctgggcaggatgggcatggtactgaccagggactgcaggatggcgtggttggtggcattcatgcaggagtccagtgggaaggagcactccccctcacagtaataggccgagtagccttggggagcgatgacccagtcctggggggcaagggagaaggtgagtcccatccatgtgcccctccctgagcctcagggcccaaacccatcctccagccctgcagggccgtctcccccaagaggcttgaatccacccaggaacccccggcagaaaaggctgggcaggagctcaggcccaacatcccccatatcttcactttgcgtcccctccccagccggccctcccctgcccacgcctcccagagctgcagtcgtagccaatgcagggaggtctcagttaccctgcagcaatgctgacagcttagttggttgattcagtcttcattttcatggttttaaaaaaaacaaaaaactgaacaaaaaaaaaaccctttctcaccatattctcactttagaaaacttggaaaacacagaagaaaaaaatacataagaaaattgaagtcaccatgattctatgtcctccctgcagattcacttctgatctacaggtggtgattgtcatttcagaaacaagaagagtcagcaattaccagccagccgaggtcctggaagctgacgtagagctcgtgccgacggcagacctgccggccgtgggagccgtggacgtcatctgcagggacagaaggggcaaggtcttttctggggttcctactgtgtgcagctactatggggtaccagggtgggggatgccctgatgagcacatttgtcaaataaatgaatgacaggaaaccatttggtctcataaagcccatccctggaactctgcttgtaccatgacccagctcagaagcctgccatggctcccaatggctagagtgacactgtgcccagtcctcccctgtccttcagcctatgagcatctttatgctccagtaaacagcccagcaggaccctcggccatcctgtgcctcctcctctctggagacccctgtgactccagcccaccctctcctgccacacccattcccgaggttcaagtggctcacgaccaggccagtcaagggccgactccctgggaaggagggcacggggttgggtcaggcctgtccctgatcctgaagggcttggcccagttggggagaaaactcgcataagcaaccgaggatcccacagggtgcccaggcacaaccgcaggtcatgaggggctgcggctcccagggaaggggcagctgattctgaaggaggctcctgagaaagacccggaggagccagggggagagagggagacttctgggcagcagggacagccaggacaggcctccggagtgccggtcaccagggtgcatcagggccaagatggtgtcaggaaaggtggctggagagtggccgtcagcttgaaccgacctgagcctgagggctctgggccaccacttggttctcgccctgcctctctcagccagaagcccacagggcctcggccccagcctgcccgaccctcaccaaagatccctgggagtcggttggcctgcggcagctcgttgcttttcttcggctgcctcctcctcagtggcctcactgcccgaggggtgcggatgggactcggactggccctgaagaaagtgaccacgaaaggctgttgggagcgtggggcccgttgacccagcaggccggccaggccaggatccacgctgtgccctgagacagaaaggagagaggggtcactcacgggcagtggccctgcagcagacacagcagcggtctctctgccggggcctgggcaggtccaggagcgtggaggctgaggacccaaggggtcctgctgagcctcagtttccacatctgaagcctggagtccttggtccagccccagccagtccacgtctctcctggggacagatttggaggaggtgggagggggtgctcagtgagctgcaggcggtgttattagtgacagctgcgtcacaaataataacatttgtgaagtgttttacaagttggaagatttttcccatggatcacctcattgggtccttacagtgaccctgcagctcctacttcacaggagacccagagtcctactgccagtgactccgagaaccagcgctcccaccttggtccaaggaccccgagacctgtgttctgtcttccgtcccgcactttctggggtgtgaatgtcaaacttatcaccgagacagctcgtggtagcatctgccaggttgagcgagtgcttgttctgctgggcacagcccaagagcagggcattaactgtctccctgatgcccacaagggagatgccaggcagagcagaaacattgaaccaagtcccagagcccaggttgcagcctgcggcagtctcattccagagcccgagttcttatgcacgagctgggcttatggacagaaaagaaagaaagaaaaggctgaaacagagatctgacttgggcctcagccccaggaggagtgaagcctgtaaacgggattgtcccccacagccgcttccagactgaggatgccgctgaaaacatgataactaaccctggagatgccaagcctcaccaataaaactgtgtatcatcctgtacttgtttggatttcaataacctttctattgtaaaagcaattaagtaaagaaacttttgaggccaggcaaggtggctcacgcttgtaatcccagcactttgggaggccgaggtgggaggattgcttgaacctaggcatttgagaccagcctgggcaacatagtgagaccctgtctcaacaaaaaaataaaaacaaaaatgagctgggcatggtggtgaacttcccgggaagctgaggtgggaggactgcttgagcctgggaggttgaggctgcagtgaggtgtgattgtgtcaccacactccagctgggcgacagaatgagagtgtgtttcaagaaaaaaaaaacaaaacacaaaactttttctggttgtttaaataagtctccacaataaacatttcaaatttataaaatcccttggagcagtataccgtaattgacttgatattggctcatcatagacatgtaggttatttcccggctttcatgataaagatgggagtgcaatggagcctcttcactccgtgcatgggtgaaatttcctgatactgaatggcagaagcatgattaccagctcattttcatgtctctttaaacagtgccagttgttcagtttacacgaaagtacatttcacctccatgttataagcacagatgtacacacgtatgtacacacaggcatatgtttgcataaacacacagatgcacatacgctcagacagacatcacacacacagatgtatttattcctacgtagttctccagtacaccctacaggccaaggacactgcctgccccaccctcagtcccactcaaaggtcagcccttaagcagctgtgcctcagccctggtgtcccttggccacttgactgaacaaccagtgaatccagagaccaacctttgacccgtgacatcatccgccacaaacaaatgcactggcaggagaggctccctccctctcacgagcatggacaagagctgctgagacagggaggctgtgagctgcagatgctaacatgggaaggaggcccagagagaatccactgggcagggcttggttcacggtgagtcaaggttatggggaagcagcagaaatacaaggaacagagctggggcacagaggaaaagacaagtgaggtcacaacggagagagaacagagcagcctgagtggggtggtggtggtcaccagcccgggcactggagtgtcactctgcagactggctgacccatggggacagcctggggcccagggcagccctcctggctccacttgcagctctgtcctgtgactccctggggagccctgcctgccatggggcctgagaggccatcagtcctgcaggctttcctcactatttgcttctgtgcagctgtgttcaagggtcttatggggggtctcccagacacaggatagaatgtcgcattagatcagttacaccacagaccctcacagagcccctctgagccaggcctggcttgggtgctgggaacccctctgtaggtctcacaggccaggcgagcctgactagggaaccttggaagcagctaatcccaggttcccattttacagaagcagaaactaaggcccagagagagcagcaactgtccaaggtcccagagcaaggtgggtcggagccaggattgtcatatacttttccagcaaactgcagggcccagctggatgtggctgggcaagatggggggtgatgaaggggactaacagtgggtctgggttcagagccctgcatctggcaggcctggagaagctcccccatccccagccctctccttccagagcccagagcctcccttctccatcagctctgcttcttacccacccattcttaggcaggactccctggctccagctggctgcagggaaggccaagcagtcaaggtggggggctctcaggctgcccagctgtgggcaggccccttccagaaaggtggagttggaggcccagagggtcacttgtccgcttctagatacctcagccttttccacactgctcctgggaaactgacgcccagggcaaatcaggtgcccctctccaggagccccaaaaggcaccccactgcccactagatgacatttcatttcaagcccccaaccccagccatagtccctggccccttttccacacccccagtctgtgccctccatgagcgccaactctccctgccctgctctccttcccaggatctggcctttcctgcagggtgaggctccaatgggcccctggaaagtctgtccttgaccagtgagaacttactactctgaccacatgcccccaatggcctgggaacccccagagctacacttatgcagtgcatgcaccaggccaggcttggttgtcaacagcacgtgtgcacgcgtgcatgcacacacacacacacacacaatcttaattttagtttttgagactatagattcaggaggaaatgcctcacagcctcttgggttacaacggaccatcacacaagtggccagtttgggcctccatcccagagaggagggcctaagtgtctggtgtgaatgatgcaggaacaattcaaatgaagctgagaaaactcatctagtcccttggttagggttctagaactcctcctgtcctaggctgtagcctttggccacacacagaggaagcttcctggtggatttcagcaccggcagcctctcccctctcagtctctcccatcacccggtcccttcccttggagatggtcctgctttccttctacggacatctagaagcttaacatctcataggtcccaggaggagagatgtgggaggaggaggggaggcttcagggaaacaaaatttaacaacaaaggccccagaagaaataccagataacggataaaaacgttcaagaaggctgggtgcaatggctcaagcctgtactttgggaggccaaggcaggtggatcacctgaggcccagagtttgagaccagcctggccaatatggagaaaccctatctctactgttaaaaatatatatacaaaaattagctaggcatggtggcacatgcctgtaatcccagctacttgagaggctgagacatgagaattgcttgaacccaggaagcaggggttgcagtgagctgagactggaccactgtactctagcctaggtaacagagcgagattctgtctaaaaaagaaaaaaaattacagtaagctaaggttaattggcccaactcagtggctcatgtctgtaatcccagcactttgggaggctgaggcaagtggatcgcttgagctcaagtgtccaagaccagcctgggcaacatggtgaaactccatttctataaataaatttaaaaaataaaaaaaaataagcaggcattgtgatgtgcgcctgtagtcccagctactcaggaggctgaattaggattgcttgagcccaggaggcagaggttgcagtgagatcactgcattccattgcattccagcctgagcgacagagccagaccctgcctcaaaaaaaagaaaaaagaaagagaaggaaaaagaaaaaacaagctcgtgaagatagcatgtcttccaatcacaaactcacatctttgctcgcctatttctcactgcagtagtaaaatgtcccttcaggtgtactctgggttgagtgattttctccctcgtcagtttttatctccatttcatggttcaagtacgagggaggcgcttgaatcaaatcttgctgtgaatgcactgagctgtgcacgctctgtgtaaacatcacagagcaaagcggacatccattcctcaccactgcagacctgcgccttgcagtgctcgagaaacacagtgaggaactgatctgttttcctgttgtttttaattaaagtcgcagctctctagaggagcactgtccacctagggaggaaagtaggaggccagtagcaaacccctcccagagctggggacatgtattcccctggggaacccggtggcacccgccctgaggagcgcaccaccccgcccagatccaggtcccgtcagggtgccacctgctgcatgggcctgaggttcggggacacagcaaaggcacaccccgtgctctttttgatgtcgtccaccgtcaggccctcccagagctccctcagcgtcagctctttcttcctgtgcacgtcaaacacggccttctcggtgatgatgcggtccacgcaccgcttcccggtcagcggcatggtgcatttctccatgatcttgggggtgttgtcctttgtgcagtgctgcatggtgaccaccactctggtcttctgactggacaccaagtccatggcaccgcccatgcctttcaccttcttgccagggatcatccagttcgccaggtcgccgtatttggaaacctgcatggctccaagcatggttagttggatgtgtccccctcggatcatggcgaaggagtcgtcgctggcgaagaagcagcccccgggaagcaccgtgaccgtctgcttgcctgcattgatgaggtcggcatccacctcatcttccgtgggaaacgggcccaggcccaggatcccgttctcactgtgaagatggacagtcatgctgggactgatgaagttgctggccagcagggggatgcctatgcccagattggcgtacatgccgtcctcaaattccagagctgcgcgtctgatgatgcgcgtcctggcgtcctcttcctttccagcgtctccatcttcctctttcaggatcgttaagcgctcaattcgtttctcgtatttctgcccctttatcacgcgatctacataaatgttaggaacgtggatgtcttctggggggaaagcccccacctccacgatctcttccacctccaccgccgtgacgtctgcagctttgcacatgggcacgttgaaattgcgggcgcttctcctgaagaccacgtttcctgcccggtcggccttccaccctttcaccagggcgaagtctgcccggatggcgcgctccaaaaggaagtggtcgccgttgaactccctcacctctcggggctggctcatgagcgccaggtggccgtccggggtgtagcggatgggggcgcccccttcctggaccagggtcccgtagcccgtgggggtgtagaaggcgggcaccccggcgccccccgcgcggatgcgctcggccagggtgccctggggcgtgagctccagctccagctctcctgccaggtactggctctcgcacagggtgttctcgcccacgtaggaacagacgatgcgacggacctgcctggcggccagcaggaggcccaggccgaagtcctccacgcccacgttgctgctgaccacctgcaggtctttcacgcgggtcctgagcagcgcggcgatcaggttctcggggatcccgcagagcccgaagcccccgatcatgacggtcgccccgtcagagatgtccttcaccatctccaccgggtccgcgtagaacttggcacggagccggggactggtggcaaagcagcgggcgcagccctgggacagcgcgagccctgagccgccggcggggaccccgcgcccgagcactgacgccaggagccgcagcgccgccatagtcggcccgggtcggaggccaggacaggtggtgtgagccctgcgtgcgcctcgggccgcgcgtcacagagcagggcgggcgcccgcgccctgacgcactccctcccagcaggtctccccggccaggcgcaggctctaggctaggcccgcgacccgcaacagggagggggccggctccgccctgggctgggggcccccgagtcagtcctccgtgtccagcgcacaggcccgggcgcaggacagagctgaggtcaggctccgcgagaagggcacaggctaggtcccctcctgccccagtggagcctcagacacaaactccaaccaccccgcccaagcttccccccagcttccccagctcattaaagacaccaagtgtccaatgagcaggcgccgctgggtgacaccgacgctcatgaacaccttcactgggcatcactctgtgccaagcaccctcctttaatcctgtgacaacccggagagtgagtgcctgccccactacagcctcccagagctcaggttcacccctcactgcgacagtggggacagtatccctcacctccatcaggaagggtccctgctctgaagaggccccccgtcttgtcctctgcatccccccgccctctccacctcccccactccagctccctgctccaacttgtgcggaattttgcagttttcttccctctgcacagaatcactgcatcaccacagcagcgtgcaggcgtctcctcacctggaaaggacctgccttgtcccgggttctctccagccccagcccatgtctctgctccccttccccagcaaaggttctggaaagagctgtctcctgcctccactgcctgtctccctccacctcctcagtcagacccacactccacggatatttaggtcatcaacaacctctgtgatggcaaaacccttggtcacttctctgttcttgccttcagtgcccacagcaggacacaaatgacaaacccttgcttctggaaacactttactctggcgtctagatcacctcatcctccaggtgtcctgctccctccctggctggtctctgtgggctctctgtggcccctccttgtgaggtctctggatgttggaggtcccagggctctgggccaggccctctttcttctccatcactaccctccttccctagatgacctggtcccatcccatgctttaaatccacttacatgccagcacctccctcgcctgggtcttcacactcaccggtccctgtaatggcatttccatgaggaccagtgatctcagtaacatcccaggggggtcagtaatattccagccaaaagagaacccttggccacccacctcaaacctgcccttcatctatcttttccccaaaaagaaaaatctattgaaaaaaatccactggctccaaccacacatcattcaggcttcctcctgttccctcacctcctcgccagctataagcatgtcctgacactgaaatcgactcatctttctccatctccactgctaccaacaagtcgctcacagcgcccacctggaccactgtggggcccccacacgtctctctgacttcactcttgtccatctcagtctgctctctccactgaagtcagggggttctttattttatgcatatattaagttttaattttacaacagttgatagttacataaaactttgtaaagatagtacagaggctaaggtgggaggatcgctcgcgcccaggagttggaggttaccgtcagctgtgattgcgccactgcactccagcctgagcaacagagccaaaccctgtctcaaagaaaaaaaaactacacaaggagttcccatacacctggacccagtttcctctgggaaatgctaatattttacactagcagggtacctttctcataactaatgaaccaatactgataccttattattaagtaaacaccatgatcgatctggatttcataacttctccctaatgaccttttgctggtccaggactcaacccaggaccccacatgcactgagctggtcttcttaggtgcctctgggctcctccaatttcccaaccttcccttttttttgatgagcttggcggttttgagaagcgcttgtcaggtattctgcggaaagcccttctctttgggtttgtttgacggttttctcgtggctggactggggttttgggttcacggagggggccctctgaggctcagtggccttctccttccctttcacccagggcacatgctagcaccgtgccggtcactgcagtgagccttcctcacctggctgaggcgctgcgcgtcaggtcccccacgccctgtccacaccgcactttcgggaagcaagtcactgggtgcagcccacggaaggggtggggagctctgctccaccccgagaggggggcatctcagagggttctcttttaaaacctgaatcagatcctgtcgtcctccactgctagtaaataaaataaatgacgctaagaaccccagcacctggccctggtttactctgactcagaatggcccctgggtcccccgccctcaccgctgctccatggcgcccccttgccgggcctcaaacacacccatctcgtgcccactttggcctctgtattcctactgcctggcataaaagaggctctccccagtgtcacctgtggaatgaacaagggcgtgaatccccatcctgcggaagagaagacggggtctggaaaggtaagtcccagccaaggtcactgaggcagggcactgccaagctgggcttcaaacccagcctcctggcctcagtgcctgagggtacagccacttcccctccttcccttcccaggacagaaactcccaaggtggaggctgctccgtgggaagagccgcctgcttcctgggaagcagagggagaggagggagcacccccactaggccagacctcgtgccctggacctcagtgacccttgcagcgggcacagctggtgaggccgggcacccagggccacaggaagccactaccgctgcctgtgctggcacagagaagccccaggggctgcagagcccccagcctcaccgtcctcagtctccacatagaggcggagtcccaggtccttgtgacgcttcagcaaccagcagtcactggctgctgtgacatccagcaccagccagccctcgtctccagctcggagcgtctgaagatccaaaaagaacaagtcagactccctgtggacatgaaagaacaattaaccggcggccggcacagctgcctccgtgtctccagggcccgctgggggctgtcaccggagtgtctcccacctgactctggctgcgccccttctgagcctcatctcattgcctcagcccacagaggtgtacacatggggaaactgagtctcagtgacctgtccaagtccccacagccaggatggcagggcagggacttgaagtcaggattgtcactggggctcttcccacagtgcaggggcctcgggccaagcatccttcccatctttgaggctctctttcagcccaccacgactccctgctgggctgccttgaccatgagactgtgaggtggggggttaggtggggcacccgggccaaggggaaggcacctgttggactgctcctggaccacctggaacatgctgacgtggagggtcctgttgagcaggtggatgctgggcaccttgtaaatccggaactccgcagctgtgaccgcctccccagccgggatctgggtcaggtcaaagcggaactccttccaatggggctcctggtggcccagggcacggtctcgctccactagaagacaaagcagcgctgggctggcactcagaatggctcgggctctggagggggcagagctggtgtgagccaccgcccccagccacccaccactcaaggtggagcggacccagggaggcctgggtggggccggcttcatttagtgcaaacgtttgttccaggcttggtcccggggtgtagacagggccaagaggccctgcagccaggctcaccctgagccccgcagctggctggtgctcagcaggccccaggctccaaaccctgaactcccgttgcgcccccttctcggcccggctggtcctgggactcagagatgagacagaggagggagcctcctctgggaacttccaggctaaagggaagatggacattggacccaaggcagaaaagggccccagccctgcagggaaacctggtagacaggaacataaccgacataactgacggcatctcaggggacacaaggcatccagagcctgcccactgcctggatgggaggtgcggcaggggagggctcagggctgacagctgagctgggctgaggcatgagtgcgaatctgccatggtgtcagggagacgggccctgcaggggccggccagccaaggcagagggccagagcagaggggtctgagggcagggcagggaaagcaagcaccaggaaacagcagagggcaggagacccacgtttcctttctggaacaagctggaagaggaaggagggaaacgtggaaaggaacaagaaaaaccagggcaggagtgacaactcccagagaggccagtcaggtgctggggaagtcggagggtctcactgggtgatgggatctgagcaggtggcatctgaactggctttgaagggtgggatgggtcttggtaggtggagaaggtggcagggagggtgctctagggagaggggacctcgcatgcacagggtggaggcgcccacaggtcagcgatgttggggacggcacatgagctctgctgcggcctgcctgctgagggtgcgaatcccgggccaggagcctgggctgcgcctctggccagtgggaagcacaggggacgggggcagcagggaggcggcgtgggtggaggggaattagaagacacagtggaggtgagggtagaggccaggctggaagtgagatgggcagcagggccccgtggcaggggctggcctgccaatcaaacaaaggctgtagttgcggaataaagcccacatttccccaggtgtccggaaatacccaggacgctatatttagggcagtctcactttagcctcccatccgtttcaaactctagaaatctgtgtttccagaaagcaggggtgggagccgcccagtgccttccccaaaacccagcactgagatttcaatgatatgtttgtgagtctttttaaaaattctctgtggttactgggctcagtgaccacggtcaggtttgtaaaagcaccaggctgtgcgggccgaggcggatgtggggagcacttcctgtcctcgtggtggggacctggtccggccatgggcaggcgaacagctgtgcggggcaggggatggggccagacgtgtgtgggcaggaggaggtggccgctcatcccagcccagggcggagaaggaaagaacgtgccttgtcccacagcacccaagggtgtcttttgaagtcttactttttggtcagaaataatactttgaattaagtttttctaaataaatgtattctttcactcatctaataagatcatcatgtttaatttagaaataaatttattcagttcttactgtgtgtacaacactgttctgggcaatacaacaataaacaagatactttttccacacacagggagtttacggtccaacggaagacataaaatgcaaacaaaaagcaactaaaatatgggatgtcatttctattgttctactgtaaatgctatgaaggaaacagaaaaggttatgggctcaagagtaatgggtgcttttcatagggtgctccgtatggcctttgagaaagaaaaagattaagatcagacatgaacattctctcaggcgttgctgataggaatgctgtgtagaggaggaatttagcaatacctagcaaaattacatttgacacaagaattccaaagatgtattggcaaaaatatgaaaagacatatgcagagagcaattcgttggtcacaggaaacagaccaagctatacctggttccataagcacctctaaatatttattttctacaaaatcataaaagctgccccaaatggtctcacgctgaaccagcttctgtctggggaagcagcaaatgaatttgctttctaaaccaccttaatgtggctcctgggaaaataaacaatcatgaatcaccaacctgtgctgatggaaaccctcagcctcctcctccagccttggataaagcaaacttcggaagcaaccccacgcttccaggaaaggccctgtgggcagaagttggcttccgctggccacatctggggccctgtgcctgccactccaggctaggcttccagatgccaaactctgcgaccctcagcccaacatcaacaagggctctggctatttttgtgctctgggcaatttagtctcacccagacaacctaaatctgtcttatttctgaccaaaaagtgggacttcaaaagacaccctcatcctccagctcagagcagaatcttgtggcctgtgacccatcccacctcccctcagaccctccccagccctgaaaggcccacaggaagagtgtcccagggccctcccttcgctggccctgccatctgtccctccggcctcttgtgccttctacctgcagacgcctcccgcagagtccctcctggaagctgctctccccgggtggccccgtccctctcagtccgactgagaaggctcccagtcctcagaccccaggcaggtcaggctttcagcctctcccggcccccatgccagggcttgctgtctctggttcagctgttcctctggacagcgagcccttggagggccgggacggagccacgtgggtggacatgggaggctcgcacgtcaactcatcggcccctgtgtttcggggccccagagcgggggtgccccggccccttcttcccaagggtctcttgtccccaggacagcggctcagtgtccggaactcagagccctttgggctgggtatcactgccagtctgggtgtggctaccatgtccccatgtgactccatcagaagccaccgacattcccgttgctgtggacctgcctcctctcccggcctggcccctgagggtggacagcggctcccccagagccccgggtgcatgggctgggcctgcctggctggtcccacaggcagcaaaggcggtggggcaggggcacttcagacccaaaagaaggcttgggccccacagcctctgcaggccaagggagggcgggactcatgacctgttggttctgcgtcctgaaggggcttctcccacccagaaatctcagcaccgcctcaaggcgagcccagggctccatgctgaggtatttccagccgggtctcatcactggcttgcttcaagggctgtttccataaatggtgctgctctcataattaccggtccaggcctcagacagttctggaccccaaattaaaagggaacacccacacatgcctccacatcaagcccgccaaggccaagaatagatcccaggagatgtaagcaagaaagacgcaattcctccagtgaaatcccgggaaagaatgaactgtgggaattttccagaaagaagtggtcatggtgacgcatcctctcttgcctatgggaaagaggttccgggaggaggggggctgggtgcacctccccaccctgtgcctcagcccggaagagcccccatcagcaggcagggggtgggcacattctttggtcagacctggaaaggccttcaggcaaccctgcagagatggggaaactgaggccaaggagggacagagggtttccagggttagattagaggcccgtgtcagattagaggcctgtgatgtggatgttcacacttggggccagtgtgaaatgagtggccctggagttcaatgggacatattgggatgggggtcacccgtcaacaaggccctcctatcaacagacacccgagaatgcccgtgaagccaccttcctccaggcagggccctgtggggacttggggttccaggggagggcccagggagctatggcacccattgtcggcccgcacacagacagggagggccggccctactctgtcccacctgaccagacccaggctcctccctgctcttggcactcgctgcctcctgctgggttcctctttccctcaatttcctgccactcaggggctgggtgcaccatggggggtgccaggaagagtcacacttggtccctattctcaggttgttcagaggttgctggggaggaggagaaagaggggctaggtgagcccctgcatcacatagacagaaagcgactggaatcctaagagaagtgcacacaatgcaggacaggtgcttcagtgacggtcgcagtcacatacagggctttggaagaaggaggcagagaaaactttccttgaaaacatattcaagaggggtggaagaactgaggaagagaactgaagagtcacccagggaaaggctgagaggcgggagatgctgtgccaggtcacactttttaagcactgacctgtgtcaggcaccatgctgggcacacgtggtacgtcctttctgttcatgctaacctgactgtgttagttgtctgtggctgtgtaactcattatgcaaatgtagcagtttaaaacaacaaacacatattgttgcacattgttcttagggctaataatccaggaacttagctgggtaggtctggatcagggtctcttatgaggtcacagtcaagctgtcagctagggctgcagtctctgaagacttagctggggctgacggatccacttccacgcgctgtctttagctgctcaccatgtggccctctccatagggctgctcacctcatggcctcccccagaacgaggcatccgagagatggaagccatggtcttttatagactaatcctggcagggacctatcaccactagtgtcatattctattggtcacacagaccagcactggcacagtgttggaggggacacagaactctgtgcatctcaggaagtgggaccatcgagggccatggtgaaggcggcaccatgacaacactgtgggggacattattcatcccaggttatagatgagagcactaaagatcccagaagttaactgatttgcacaaggccacaactggaagcatccaaggtgggatttgggtcaaagtctgtctggactccaaagtctacattcacttctcctaatccacgacctctccaagctgcagatatgtcaagggagcaccaagcggtgcagttgactagaacgctgaactctgaatgccaggctggggaaacgtgaattccattctggcttgaagggacacacagaagctcctgagcaggaaaagccatgatgggattttcacttcaggaactggcatttcaaaaacatgcaagaggccaggcgcagtggctcacgcctgtcatctcagcactttgggaggccaatgtggatggatggcttgagcccaggagctgaagaccagcctgggcaacatcatgagacctcgtctctataaaaaaatgtttaaaaattatctgggcatggtggtaggcacctgtacttcccagctacttgggaggctgaggtgggaggatcacttgagtctgggaggttgaggctgcagcaagctgtgatcgcgccactgcactccagcctgggtgacacagcgagaccccatctccagccgggagccatgcctcctctcctttggccttgtttgtctcccagaaaacgagagaaggatcttgtcggtcttctgaactgttgaaccctcacacccatgtttgccaggtgggtgaatggacatttcttccatttggggatcatttatattgagttgtctttgggcttctctttctcagtaaatgagcagactttgggttgggctggggctatacttttattagcccccaagataaacaggaagaggaacagcacacagtaggtttgcagcagtgcttgctaaggagtgttcatagactgctcttaaagccctgaatgagtcaactttctccacacccaggtcttgcagccatcaacttccccagaaccctgatgtgtgcagggtccaggactgttcagaaggaacggctgctactcaagatagagccagcagttaaaggaaatcaccaacttttgcttctggtcttgccactaaccagctggccttgggctaaaaacaaataaagctgacatttattgagcactgaccagccactcttttcataattttacacagattaactcatttaatactcctaatcatctaatgaggtagctctcccattttacagatgaggaaactgaggctcagagcattaaataaattagaccataatcgtgtaaattgtatcttaggttaggctctctgggcaacagacactgggtcggaaagtttactgggaaaactggaaagtttactgctttttgtagtgaatgaagggagcaagttttggatgcacccacaacaaaggcctcagacaactgagaccacactgggagctctgggggctggtggccctttagagctgtctctctttaaggcaagggggctgggcactggtactgccatagaccagctgttggatggtgggtgtccccagggatggtgcctaaccttgggcagttctttaggcccagtcaatcaatacctagagaagggtagggcgtggtggctctcgcctgtaatcccagcactttgggaggctgaggtgggtggatcacctgaggtcaggagttcaggatcagcctgactaacatgatgaaaccccatctctactaaaaatacaaaattagccgtgcgtggtggcgggtgcctgtaatcccagctacttgggagggtgagacagaagaattgcttgaacccaaggaggttgcagtgagccaagatcgcaccattgcactccagcatgggtgacaagagcaaaactccatctcaaaaaaaaaaaaaacaaaaaaaacctagagaaggactcccctgtgagctgtcagcagccggcactccaggcagctgggtcacgagcgactcaatgctgaagagaagctctgggaagccccccacagcatccactacaaggatgcctaggtggaatgaggatctcacccaggcagcctggtcagattctggagctatgctttttactactctgctctaggtccctaagtaaatgactgggggatggggcataatccgcaggcccttccctcataatacagccacttattgagcagtgccagacacttgctttgtttttgtttttgtttttttttgagatggcatttcgctcctgttgctcaggctggagtgcaatggcgcgatctcggctcactgcaacctccacctcttggattcaagcaattctcctgcctcagcctcccaagtagctgggattacaggcgcctgccaccacagccggctaatttttgtatttttagtagagacggggtttcaccatgttgtccaggcttgtctttaactcctgacctcaggtgatccgcccccgcttggcctcccaaagtgctgggattacagacgtgagcttccgtgcctggccagacacttgctaggtttttatgtgccttaacctatttaatcattgtattatgatacaggcattattattattatttagacagagtcttgctctgtctcccaggcaacctccatctcccaggttccagcaattctctcgcctcagccgcctgagtagttaggactacagtcccgcgccaccatgcctggctaattttttttgcatttttagtagagacaaggtttcaccatgttggccaggctggtcttgaactcctgacctcaagtgatccgcacaccaccacacctggccggatacaggcattattatcccagttttaaagatgaggaaactgagatgccgagactttaaatgatctgttcaacagctcatagctcttaagcagtagactcagaattgaaagccagtgagccccactccagggtcactaaccaccactctgctgccccacttccagggcctaccctcctacagctgtgatctacctttcatatctgctcctgtgggtctgtgcatccaggacccggggccagtcacttacactctttgagactcagcttcctcctctgtgaatgagggcagtcataatcatttactcaggggtgagaaaacactgcggaaatgggtaggaccagtcactagggatggaaagggtgcaccattctggtggccagacagaactttggggaaaagggacccaccttcaattattgcaaggacaaatacctttgggcatacagtcaccctaatagttgacttttaagatggataaaagatttattgttaaatgaaaaacaacaaagttgcaaaacagtgagcattaacgtatgcagttaaaaaaaagaaagaaaagaaaacgctgggcacagtggttcatgcctgtaatcccagcactttgggaggctgaggcaggaggatcagatgaggccaggagtttgagaccagcctgggcaatataatgagatcccgcctctacaaaagatttgaagcaattagttggacatggtggtgcacacctgtagttctagccattcaggaggctgaggtgagaacattgcttgaggccaggagtttgcagttgcagtgagctatgaccatgccactgcattccagtctgggtgaaagagcaagaccctgtctctgaaaataaaaacatattttttaagcagtagtctcagtttacatcacacgttcccattcaacacagtccatttcagcagcacacactgcatttaacggtgggccaggccctgggctgtgtggagaggcagctgctattttggagaagagcagaagatgtggaggcagggggacaatctgctgtgtggccttaggaaaaccacctatctgctctgagcctctctctcctctctttcaaacacagatgtgacggcaattgtgagataccaatgaaggaagagatgcagaggttctgggcacgtgggcatcgctgggtatcatctcacacaagcccacaacagccccataagatgagtatctccattttacagaggaggaaactgaggcttggggaggttgactggaaagcccagatcacactgagatcaggtgttggcgtcaggatgcaaattccttgtgtgtgggtctcaggtcagaaacccccaatctagccctgtctgtcctgccattgttcagcccctcctgtttcccgatggggcgttgctgtctagcacacccgacaattacctttagggctcatgtatgtattatgtgtctctagactagaaagtcatctccctgagggcagggactttacttctctcattgttatatccccagcaactagaactctgcctggtccgtggtaggtgctacagaactatttgctgaatgaatgaatgggaaaatgaaagaggtccctggtaaagaaccaaaggaagtggccctggggcccacggagatggtgccacccttctaggtcacacggctggcaagggcagagcaggacccgggccaggtcccgaattcccactcagtcctgcttctcccaaatccagacggctctgttcatcaacacccctgtccatggccaccggagaccacaggagcaaatctgtctggttcaggaagggatcaggacaaaaatgaagctgcctgcattctgatcctggctggacttctgcctgctaggcctgcttatgcctcagtttctcaatctggaacatgggcacctgcctctctgctgagatgggtggagaaggattcagaaggagtgtgcagaggtggtccttcctgccatccttcctccctcaggaggggccgggctgccctgaggcactggggccaaggcatggcggtgttgtgagaaggcgcctctgccacagagccacagggtcagggctgggaggcaccttgcttttctgatgccatcaccgtagaatggacgagaaagcagaggcccagggaagggaagggccgtggctcaggacatgcaggagttaatggtgggcccaggcagcacaagaacctgggtcctgcctcccagctcagggctctcccctccctgagcacagagagaccagggacagaatccaaccgctccatcactgtcctgcccaagagagcccaggtctacaggctgatatggatgacaggccaggcagggccccggctctgaccccagccctggcctcccagtgcaggctctgaacatcaggacgcaggcttggcttcctaaagcacctgctctgcacggagacctgagccatggtgggaggcctatgagagccccgccccctgggtcccacaggctgccatcaagagttgggccctacgggcaccagacctggctattcaggagtcagatgaagctgataggagaggtggagccggcaggagcaggtgtgggagcctgcgtgtgggcggtgacaccacagtgaccctgctattagatcccgtggtggcctctgcccacatgactgtaatctcagctactcgggaggctgaggcaggagaagggccaccaacctccaggggcctccaaacatggagagcatcctggtatgtgtctaatccatgcccccccaccgccccacccagcctcagtaattaccagttaaagctactctaactgagagagttctactagtgcagttagcacagcagaataaagaaggcctttctgacagctggctgcgcccacccacagcctgggcttccactaacaatgatctgcttgttaatctcgcagcgctggaggccccaagtcttcatgaaatgcacaaagctggtgtgggaagaagctgggatttgaaatccacagccgtggatgtcaccccggatgtgcggtgtggccctgggctggctatttaacctctctgagcccatgaaacagggctggcaaaacagtctcacatgagttaaatgaggaattgtaaggctgtgaaagttcacatgctacttttcattctaaaaacaggtacaaacactttttgattggcttttagaatccatttctaggttttacatgtgtataagacatgtggagatgttcctgtcacctccgaactaggccacagctgggagggcctggggccaacagtgcccaggtccaggttcaccctctgaggggagcagcacaggctttctactcctgcccctctaccaatcacacaacaaccctgaggacagatcaccaggcacctcattttacaaggagcaacgaaggctgagagggtgaggaactttcctaaggtcacacagaggggtaggccctgcccaattcatagcaatagccccaccaggctgtgcatgccttgacccaggggatgccaggggaggtcggatgtgggctgggtggtgacgcattctgatgggcggctccctggggacattcttggacgactccatccacaactcttcttggtcctgagcccagtgtcagcctgtcctgatgacagagccccagccccagcttcacagatggtctcctctgtcccacatccccaccctgtcctctaactacaaaggcagcatccagatcccaccggctagagtcctgtccctggcactgggcgctcagtgatggtgaatggctgcctcctgctgctcgcctccaccaccagctctgggttgcgggaagcagaggcttggccatgccctcttctgtcctagtgtaggaagcaaatggctgatggccccacaaaacctgctgcggctcagtcccctgttttcctcagcccagactcctcagaaaggtctctgcaccttgaaagcctgacctgacaacagaaatgtcatctctttgagccctggatggacagtcaggcttcctgggcctgtcctggctcagcagcgtagaggctgcgctgtcctaggcatggcgctgcctctctgagcctcactgtcctcatctgggagatggggatgaagaccgtggctgttatcagggttgtcgggaggatgaagaattaatgatgctgtctgtggagggaggctgatggccggggccagggaccctctccctcctctcagccccacagctccccgactttgggctgatctgtggtccttggttccccagaccccagactgtcactagccacagacaggaggcaaagcagatgggtgacctgaccaatagtaactacatgaccatagaccaaagagtttagtactggaaaaaaaatctctgagatcttagggaataaatagctccagggtttgatacaagatatttgcagacaggaaaagccgggctttgcctgggagaacaaagtgggtccagctgcccactggaccattccacaggactggacactcaccccataccagatcacatcccaggtgttgggcccagggtgacaaggcaacagtccctgccccagcgagctgagtttgctccttccccagccgcccccctgacagccgcaccccacccaggctccgcacagagaagagcctgctgtggactcagggcacgcgactcagctctggtcactccgatgtgaccacaggtttccacgctgaactttgtccctctcctcagtactgcccttatcacagtgacagcatcccggcctctgtttactcacctgtctccccaggaccaggctgtcttcccggggcagcccaggtgggcaaagacatcacctgattcttactcctgggtgtgtttggggcagggtgaaggcagcgcctgggagtccacagtcccccacactctgctcctgaccaccccgcagcccagggggcccccatgacccttagaccttccctaaccacggcggtcccactcccctgtggttcgcgtccaccgtctgtgactccccgttcggccagggcccggcacagcccgcggatgcgcgcccctcccctgcagccagcttactccgagggtccccgcgcgggcggccgcactcacccatgttaacgaagctcatgaccaggtcggcgcggcccaggcgccgctccgcgggcgcgccgtcctcgtcgtcgtcgccggccatggcgtggtacaggtccagcatgaagagcggcgcggacgcgggcagccgggaggcggcgggtggcgcgcggggccggggccgcccaggcagcccgagcaccgccaggatctcgcgctgcacgtcccggcgctcgcgcgcgcccagacgtcgctggggacagccgggcgggggtcgcaggccggggccgcccccgcccagcgcgcatagcgccaggcccaggagccagagcgggccggggagcgcggtcatggcaggccgggggcgctcagctggggcgctcagcgggcgcgcatcggctccgcggccgacccagggcctggggacgccccgacggcaaggaggctgggctcggcgggcggcgggcggcggggcggggcgggacgggcggcgaccgcggcctcagcgcggtccctggagcgcccgccgcgcgacacctgtcctggctcctggacgagaggacgcggacgccaccgcctcgaggccggggctactctgcggactgggactctcggccaatccgtctgtcgccgccgtacccgccagtccggctgtggccgcggtccgagcagcgcaggggcgatgggcgagctcctgcagccacccgcttggtgcggttcccgcgagtccctgccctgccctgcccagcggtccgcgtcgcccgcccccaccccgggactgaccaatgggggggcgggggcggggcctgggagcgggggccacgcctgcgagggggcccggggctgcggccggtgtcgcgggtggggagaccccgaggtgctacctgggcgtggcgggtgggcaggcggcccgggcgaggggctcgcagcctgggcgtcagcgtggtcatggccgtcgtggcttccgccgcgggcctcggcgcagagatcctagggccgcggcgcccttccggtcccgccagtggtgccacccggccgccccgccgtcgcgtgcgcgggtcgccatggcatgctgcaggcgcctccttcccggcacctgctcagctgctcctccccgcgcccccacctggctcccgcgtgagcctgggcagcgccccaggcaggccgcccccgccagccctcgctgcgcggcgtgcgccccctgcgcccccagtactgatccagcttcgcgggggagacgcgcacccgcctcctgcctttagccgggccaggagctctggggcccttctggagcacccgggagccacctgtgcacttctcagtcgccacggccccggtgcaggcctggcaggagaaggatccccgcggaaatgcctctactaactcagcccctttctgcactctctgctcttctctgggcgcgctctcgccttacttattcctgtgtggttcaggcgctgcggaaggagaaggcacctagactgtactgggaaggctcctggagttgacctggagcgccaggaaaggtcagtggaggaaagtgctccaagcagagggaagagcttgtgccaaggccctgagaccccggcgggggagcctaataatggcaggtaacagtcagcacttgccacgcgcgaggcatgttctcagtgtgtgtcttgtgtcatttctgtgatgcttgcacatcgtcagggggtacctaccactggaacctcctcttttaacaaatgaggaaactgaggcacacagcggttaagggacttacgctaggtcacacagcagtagagctgggctggggcagggggcagctcctcaagtggaacctggagagcccacggggcaaatggcggaggctggaggggctggcaagggagggactgcaaagggcctcacaggggctagacgagggccctgggcaccagtgattatggtgcccccccatgtggattgaagattaaacctcgaagcaagtgtataatgcccccaaaaatcacatttagaagtcatcacttcaataaaaatttctatattaaataaattattaatgtaaatggtcatttgctggctccttaagcacatgcctagtctgtcttttaccgaagaagtaaatttctgcaagggtaaataataaaatgaaataaaataaatattattattacactattcagagcactaaaagaactactttttcctgattacagaggtaacttgcttttgtagaaacttttgaaaatagtttcataatcacttttgcacatcatcagggggtacataccattggaacctcctcttttaacaaatgaggaaactgaggcacacagcgattaaggaacttatgccaggtcagtacagaaaagtaaaaatattacccccaacaaattttaaaatcacccaaatccctgtttccagagataatcactggtaatatttgatgtctctttttcttacatgtatgtgtattttttcatacaaaaaacaggatcttatttgctttattagcttcacgttatattgcagtatttcactatgccattaattattgcacactttttttactggcttcgtggtattttttcatcatattgttatcataatttttttaatcaagcttatgttatgggataattatatttttatattatatactatgttgttatgaacaatcttgtagaataatctgtgcacatccatggtgatttctttaggatgaatttctagagatggattttttttttttttttttgagatggagtcttgctctgtcacccaggctggagtgcaatggtatgatcttggctcactgcagcctccgcctcaagtggtctttgtgcctcagccccctgagcagctgggattacaggcgtgcaccaccatgcctggctaatttttgtatttttagtatacacagggttttgccatgttggacaggctagtcttgaactcctgggctcaggtgatctgcccaccccagcttcccaaagtgctgggattacaggcgtctagagatggaatatttgaatcaaagagcatatacactttttatggtttttgatacatattatctgttgccccaatagcacgagggtgcttattttctatcacccttaccaacactagatataactgttaaatacataaataaatcaatctctgctggtttgatagatgaaaacctctctgctgttgtaacttgcatgtggagggttactacacactgctctcttgtttttgaaaccctgtcctcccctggcttcaaggacgcctgctcccttgctgaccactcctccctgcccacttctaaaacatggatgtctgctgggtctgtccacagtcctgttctccccttagacttgacctggtgatgagctcatccactgaggcttcagtgccgccatacagtcacacccaactccaaatatattagtagggcaggccttcctgctagatgccagaagctacatccaatgaccgataagacatgaccagagccagaagccaaaaccctggcgcagacacacgtccctccctcccaagggcagttcagtctattgattctaccttcaaatgcctcttgaatccctgagcctgtgcacgcccctttgcactcaggtgtttcatggagcacctcctccccactggtctccttatgtctcatctcactacccaccccacccagccctcactcattccgcagaatgcatatttccaaatgaaaatctgaatccttccatggcctttcattgcttacagcagaatttccccaggtgaggattctgagggctttcctgcaaaaggggttcagtacacactgcgctatatatttcccccttggtagagccctcatgcacttagcactttgtaagctctagaaatcctgcagtaaaaataaataaataagtaaattaaataaataaataaataaaaacctgtttagccttaacttggcttcttccaaatgcatgtgactatagctttttagttttttgaggaccacatcttggggaccagcaaggcacaaggtgataagcgcccaggacccagtggtctggcatcatcacctggcccctgctgctgacccatctccacagtttttttgttttgttttgtttttgtttttgagacggagtcttgctctgtcgcccaggctacagtgcagtggcgcagtctcggctcactgcaagctccacctcccgggttcacgccattctcctgcctcagcctccctagtagctgggactacaggcgcccgccaccacgcctggctaatatatttttttttttttttgcatttttagtagagacagggtttcactgtgttagccaggatggtctcaatctcctgacctcatgatccgcccgccttggcctcccaaagtgctgggattacaggtgtgagccaccgcgcctggccaatctccacagtcttatctggctgctaaccccatatacttggctgcagtcccatgggaatacttgtggtcctcctacctgtcctcctgttgacacttctgttcacctgaacatgtggtttcctgtaccaagaagggaaacccctttccctgtctggtcaggtgttacctccctttaagatgcagttgaagtaacacctccttttcctgatgccctcttcaccttcatgagcagagccatttcttccttcctcactctctcaaccactccttttacaaaataaaagggcatgtattcacatgtttgttccctgcactaggctgagagcttctgcaggcagggaccatcatcttaatttacctttggatcccagtgcgaggcttgcatttagggtttcagtaagtatgtgtgaaacagagtagcctctgtttctctgaaatagcctctgaaaacaagagtctctcaacagcttcaaggaacggatctcgcaaccttcatgaactcagtaagaagtgcttccattgagaagtgctcattatttcacggggatgaagaacagaagcaccaagctgtgttaaagtgaggagtcagtggccagtggggctcactctcttcgctgtgtgaccggctctcttgtacatcagcaacaaatgcaaatccatgaatcttcatgactgaaaccataaggttaaattcatgactgctaatacctactgcatatagaaaatgaaaagaaacaattttaaaaagcagagaaaagctttccataagaaagatgctacaggaaagcctgagcgcagtggctaatgcctgtactcccagcactttgggaggctgaggcgggcaattcacctgagggcaggagttcgaaaccagcctggccaacatggtgaaaccccgtatctactaaaaatacaaaaactagctgggcatggtggtggtgcctgtaatcccagatacttggaaggctgagccaggagaattgcttgaacccggaaggcggaggttgcagtgagccgagatcgtgcctctgcactccagcctgagtgacagagtgagactctgtctcaaaaaaaaaaaaggaaggaaggaagggaggaaggaaggaagggaggaggggagggagggagggagggacaagaaaagaaaagaaggaaggaaagaaagagaaacatgctacaggaatggagattatctcatgttaacagcgacacatttaacctttgcatttgtgatctgaggaccttttaattatattacaggatcctatagtgaggtcctaggtcatgcctgtcagctccagaggccaccatgaggttggtgcatcgtaacacctcattaaatgactgctgagggcccaaagggtgtctcacttgcctttctggctgggtgctgctgggaaaactccagttcatcatgttcccagggtgtgcttacacgtcataaagaaacaaataaacataacaaggcagtcctgtcttcatgggggagtctttagtcaatgggtcaggtcaccttctgttagtagactaaatgcttcaattaaaagccagggccgggcgcggtggctcacgcctgtaatcccagcactttgggaggccgaggtgcgcggatcacgaggtcaggagatcgagaccatcctgactaacatggtgaaaccccgtctctacttaaagtacaaaaaattagccgggcgtggtggtgggtgcctatagtcccagctactcaggaggctgaggcaggagaatggcgtgaacccgggaggcggagcttacagtgagccaagatctggccactgcactccagcctgggcgacagagcgagactccgtctcaaaaaaaaaaaaaagtcagaagacgggccaggcatggtggctcactcctgtaatctcagcactttgggaggccacgggggggagcagatcaccggaagtcaagagttcgagaccagcctgaaaccccatctctacaaaaaatacaaaaattagccgggcatggtggcttgcatttgtagtcccagctacttgggaggctgagacaggagaatcacttgaacccaggaggcggaggttgcagtgagccaagatcacaccactgcactccagcatgggcaacagagcaagactccatcttaacaaaaacaaaacaaacaaaaaaaaaagtcagaagatggctgaggtgcatgtgcctataatctcagctacttgggagagagagttgggagaatcacttaaggccagtagttcaggccagcctgggcaacacagcaagaccctgttttttaaaaaagtcagaagttgtcagatgagttaattaaaaaaaggcaagaacaaatgacatgctctctataagagatgttctgtaaatataaaagcacagataggttgaaagtaaatgagttgaaaaagatatatcatgcaaaaaaaggagaaataagcctggagtggctatattaatatcaggtaaactagacttcaacataaagaacattagcagagataaagatggattcattgcatcagaatgcatcctactgaaacaggaggacattatgtagcacaacatgacaggcccagagtacactaaatattgttgtgtatggtttaaaagtggtttcagagttctcacacttattttagaaaccagtggaaatgggtattttttgaagatttctacctgaaattaaatttattttgtgatgcacctgtaatcccagcactgtggaaggctgaggcaggaagatcacttgaggtcaggagttcgagaccagcctggccaacatgatgacaccctgtctctactaaaaatacaaaaattagtcgggaagggtagcatgtgcctgtagtcccagctacttgggaggctgaggcaggagaattgcctgaacccgagaggcggaggttgcagtgagccaagattgcaccactgcactccagcctgggtgactgagtgaaactctgtctcaaaaaaaaaaaaaaaaagtattttgtgaaccaaatgagaatagattgggggtggggcaggggtgggtgtggagggaacctcaaagtgaaatttacacattgccaaatctgaatcaaatcaaaacaattttggtaaaatctttgtgagcaatgcagaatcccagcaacaatttgtttaaacacacagagtaaggagcctcctctctgaccagcagcatacaggatctttcatggtgtcctttcacccctagagggttaacagagcagaaggtgcacttaagtatgcaaccaagcagcccttccctccatgtagccgagtccacccctcattgtaggggcacccttgaagttcatgcctaggtcaaagtccccacacacagcctggttctcagccagctgcagcttcaacttgtacaactagtctaccaaggcctgcaaatcatccatgaactggccccaaaacagcagggcctcctccaacttgtgctgcctaagaaaagcacacataggccactgtttttagggacccattttttgttttctttttcttttgagacagagtctcgctcttttgccaggctggagtgcagtggcgtgatctcggctcactgcaacctctgcctcccaggttcaaatgattctcctgcctcagcctcccgagtagctgggactacaggtgcctgccaccaccctcagctaattttttttttttttttgtatttttagtagagacagggtttcactgagttagccaggatggtctcgatctcctgaccttgtgatctgcccgccttgtaaatgacactatcaacagagtgaaaggcaacccacagaatgggagaaaatagttgcaaatcatatatctgataagtgattaatatccagaatatatatgtttatttttttcagaatatatattttaaaacctcatacaactcaacaacaataaaataaacaactcagttgtaaataggcaaaatacttaaaaaatcctccaaaaaaagatctacagatggccaataagcatataaaaagatgtttaatctcactaattattagggaaatgcaaatgaaatccacaatgatacctcttcataatcattagaatggctattatttttttaaaaaacagaaagtaacaagtgttggtgagaacatggagaaattggaacccttgtgcattgctggtgggaatgtaaaatagtgcagctgctgtggaaaacaggatggcagctcctcaaaaaattaaatatagggccgggtgcagtgactcatgcttgtaatcccagcactttgggaggctgaggtggtggatcacctgaggtcaggagttcgaaaccagcctggccaacgtggcaaaaccccatctctactaaaaatacaaaaaaattagctgggcatggtggcatatgcctgtaatcccagctacttgggaggctgaggcaagagaatcacttgaacctgggaggcggtggttgcagtgagctgagatcgtgccactgcactccagcctgggcgacagagtgagactctgtctcaaaaaaaaattaaatatagaattactataagatccagcagtttcaccattgggtatactatatatagatactttatagatttgccttacaagaatggaagggagggaatcaaaaagaacaaatatttacacatccatgttcatagcagcacttttgacagtagccaaaaggtagaaacagcctaaatgtccatcaacagatgaatggataaatacatattgtatggctatacaagagaatattattcagccttaaaaaagaaatgaaaatctgacactcactacaacatggatgaaccccgaagacattatactaaataaaagaagccagacacaaaaggacaaatattgtatgattccactcatgtgaggtacttaaagtagttatattcatagagacagaaagtatagaatggtggttgccagtggctagagaaaggggagaatggggacttactgtttaatggatacacagtttcagtttggagagatgaaagagttctagaaatggacaaggcgatggctgcagacaatgtgaatgaacttaatgccgtgaactgtacaccccaaaatagttaaaattgtaattatatattttgctataattttttctgagacagagtctcactctgtcacccaggctggagtgcaatcatagcttattgcagcctctatctcccaggctaaagcaatcctcctgcctcagcctcctgatgggactacagctacgccatcaggcctggctaattttttttttaattttatttttagtagagatgaggtcttactatgttgcccaggctggtcttgaattcctgagctcaagcaatcctcctgcctcaacctcccaaaatgctgagatgacaggcgtcaaccactgtgcttgactcataatttttttaagtgctgtaatcccagtgctttggaaggctgaggtgggaggatcacttgaggccaggaattcgagaacagcttgggcaacatagcgaagctccatctctacaaaaaaaaatatttttttaattagctgggcatggtgggacctgactgtagggaggctgagctgggaggatcgcttgaacccaggagttcaagattatggtgagctatgatcatgccactgccccccagcctgagtgacaaagcaagaccctataaaaaaaaaaaaaaaaaaagaccaagagtaatgcctaccaggggtgtccaatcttttggcttcccttggccacattggaagaagaattgtcttgggccacacataaaatacactaacactaatgatagctgatgagcttagaaaaaaattgcaaaaaaacctcatggtctttaaggaagtttctgaatttgtgttgggccgcattcaaagctgtcctgggctgcatgtggcatgtgagcctcgggttagacaagctcggccttgacatttgtactcaaatcactctctagaatggactaagcagagtgcaggcgcaggtacagagcacctctgacatcttatagtccaataaccatgcacatggacacatcctagtgacctgaagcctttattcattccttctacccctcctgtggtaaagggtggtggatggttgagggtgaagcaaaggttaagtcaagaccacctgctctggccaggcatggtggctcacatctgtaatcccagcactttgggaggccgaggcggggggatcacaaggtcaggagttcaagaccagcctggccaacatggcaaaaccccgtctctactaaaaatacaaaaattagccaggcatggtggtgcatgcctgtaacaccagctacttgggagggtgaggcaggagaattgcttgaaccctagaggaggaggttgcagtggatggtgccactgcactcaagcctgggtgacagagcaagactccgtctggggaaaaaaaaaaaaaaaaagagcacctgctttgcagtcacacagacaggggttcacatcaaagctccacgtgggccgtgtgacctggaacctctctgggcctctgactccttgtgtgttggatgggatcataattgtacctgcctagagagctggggtaacagcattacacagggcccatgctcacgcaatgagtgagtaaaaccatcttccaaaggaagagggcctccagaggcagatgtgggcatgggcaccgcagcctggagtcgcagctcctccactcctggcttggacctctgagcctcacttcctctcctgtaaaacacgcatgagacacacctgcctcgtgtgggcctgggccgcttgctattactaataaaacagcagcaaccacaggacagcttcacttccggaaactccctctgtcacgtgctttgcatgaatcctcacaccgtctcactaggggcgctctccccgtttcaccagtgacttggtgacaaccagccttgctcacgaagcgtcagccgtatcctttctgtgtgcagtggggtgtgggttgtgtggagccgcggtgtctgtggaattcacaggctggggccggaatccatggcccccgtcgccgctgccaccccccaggtgctggggtgacctgatccagggttggggtctaagctgctggggggttggagtcttgggctctggcccacgtccgcctctgattggttctaccacctgagccggtcactgaccctccatgggcctcagcttaccctatggtaaagtgagaactagggggtcagactccttgatcaccaagatctctgaccacagccaaggctaagggaagcgcaggaaaacgtggggctcgtccaaattcccagcctctctctgccccctggtggacgccggcagcctagcacccggggggagatgaccccgacactgtgtgacctctgccaaggcacccatccctctgagccccagttcccaccggttacataggaatgattataatacccacctctttgggcaattgtgaggaggcaaggagataatacatgcaaagtgcttggatgggatgggtactagccactcaacagaaggcagatcctagaatggggatggcaagtcctgtcatcagtgaagaatgtaatgactgcaagcttagatgacatgtctgttactggaaaccagagttgtttacttaagctgtaaatgaactcatagtccctgggataattatctcacctctggataaataaactcaacagccttatgtattttattaatttttcttaaaaaaaagcttaaaatatttttcctttgatttgttctctttctttggtttctgactttattatgtcctttctttctgcttaggcatttgttttattgctcttttttcaccaactcaaactgaatggtcaccttaacagttttattgaggtataatttacacaccataaaattcacctgctttaaggatactattcaatgatttttagtacagttacaaagttatgcaaccatcatcaaaacccaattttagaatatttcaatcacccaaaaaagaaatatcacacccatttacagtttatcccctttcctgcccccagccttaggcaaccactaatctactttatatatagatttgcctttcctggacatttcacaaaaattgatttacgcaatgaatgagtaaaaccgtcttccaaaggaagagggcctcccaaggcaggtgtgggcatgggcttgccacaatatgtggcattttgtgcacttaatgttattgaggattaatctatgttgtaacatgtggcggtattttgctccttttcattggcattctcttgggggcttgtttatttttacatgtattgttttccactaaatgtacttaaatatataaatttgtctgtaagtgctgctaaaacccagctaagctgtgccccaccaactttaatgtagtttttccactattcagaagtaaatatttctcacatttctttatgacgtccttctccaccgaaagttacctactgtaaactaaaaataaaatcctaagtcccccaccaactgaatggatgccccccttggccaaggggacaccagaaaaaacttaggaatggagttccagccatggcaggacaggaggtcccctttgtagtttagacacaacagctgaccagcattgatgttaaaatagagagcataagactgacagaacagacttttgtggcaataagatacaaaattataggctgggcgcggtggctcacgcctgtaatcccagcactttggggaggctgaggcgggcagatcacttgaggtcaggagtttgagaccagcctggccaacatggcaaaaccctgtctctactaaaaatacaaaaattagccgggcatggtagtgcacatctgtaatcccagctacttgggaggctgaggcaggaagatcacttgaacctgggaggcgaaggttgcggtgagccaagatcacgccattgcactccagcctgggcaacagagtgagattccatctaaaaaaaaaaaaaaaaaaagatacaggccaggccaggcaagggttaagtcacccacccctacacttaaagaataaactaagttctaacagccacaaggtttttcgttttctctagcagaacaataagcactggccttgagataagcaatatgaaaataattgcagcacatccactaactgaccactgtttccataagccataactacagcttggactggacaagagactgatatcaataattttctcctgatagtaagaccaccgaccacggactggttctggccagtttacagaggctgtgcacttgagcgcttttgtgtcctgaaaagaccttttgacatctagggcctaattgtaatatatttatttatttattatgattattatttttgagatggagtctcgctgttgcccaggctggagtgcagtggcacaatctcgcctcactacaacctttgcctcctgggttcaagcaattctcatgcctcagcctcctgagtagctgggattacagatgcgtgccaccacacccagctagtttttgtatttttaatagagacagggttttgccatgttagccaggctggcctcaaactcccgacctcaagtgatctacctgcctcagcctccccaaagtactgggattacaggcgtgagccactgcgcctggcctcataattgtaatacatttaaatgttaagtgtccactccagccgggcgcggtggctcacgcctgtaatcccagcactttgggaggccgaggcgggtggatcacctgaggtcaggagtttgagaccagcctggccaacatggtgaaactccatctctactaataatacaaaaattagctgggcgtggtagtgcacatctgtaatcccagctacttgagaggctgaggcaggagaatcacttgaacccgggaggccgaggttgcagtgagccgagatcgcgccattgcacgccaacctgggcaagggcctgtctcaaaaaaaaaaaaaaaaaagtgtccactccagggtgaacatgagtctccaaaattttaatataaacaaaacgtgaaatcttgttcttccacacattccccacacaagtgctgccaagatcatctgaaaagttttaatctacaaagaaaggtccaggaccattgtccatggctctgcccctcctacccccggcttttcagttccttatctccccatcacaatgccgtccttccccacttcaccgtgccccgatgtccctgacaaccctctgcaactagtcaaagccccggactaccgttgggcccacaaattcatgtctttcctgcttgcttgctccaccaatcaagccacttctctttctaggcctcctcaagacctccttcaatttctgcctatccatcaactcatttctgcctccattttcctctttaaccagcttaaatgtcatgttccatcatttcaatcacttccttgcaaacatcctaaaatccttggctctccctttgtcctcagcaccaacctatcaaaactccaaacatgttcaggcatggtggctcacgcctgtaatcccagcaccgaggccaacgcgggaggatcacttgaactcaggagttcgaggccgcctgagcaacacaaagagaccttgactgtactggggaaaaaaaaaatagccaggtatagtggtgtgaacctgtagtcccagctactcaggaggctgaggtgggaggatttctggagccctggagatcgaggctgcagtgagctatgattgcaccactgcattccagcctggacaacagagcgagactgtttctatttttttttttttttttttgagacggggtcttgctctgtcacccagactggaatgcagtggtgcgatttcggttcactgcaagctccgcctcccaggttcacgccattctcctgcctcagcctccggagtagctgggactacaggcacccgccacctcgcccggctaattttttgtatttttattacagacggggtttcactgcattagccaggatgctctcgatctcctgacctcatgatccgcccgcctcggcctcccaaagtgctgggattacaggcatgagcaaccgtgcccagcctgactctgtttcaagaaacaaaacaaaacaaaccctccaaactctaggtgaacctaactatgcctctcctttatgcttacagccaggccaggaagcattttttaagaactactgggggtgtaagtaacactataaattcagtcaccaacctcaatgccgttagacaattccagtgcattttgatgtttagttgcactgtcctcagacttcaagcttcccttctagctcctcgctctcagcagatcacctaatgttatagctgcctaatcctcctttccttctcactgctgaaagatgttccttctgtgctcagaattccatccctccaggcttctctggaactttgcactattcattggcaggagatgagactgtgtggggggagaggagttaggagatggttgcaggggtacttgttttcaaatgcaaataaggttatacttctccccaacaagcaatcctttgatacctttccattgctctgaagattttttttttttttaaatggggtcttgctctgttgcctggagtgcaacagagtgctagagtgcggtggtgcaatcttgggtcactgcaacctctgcctcccgggtttaagcaattcttctgccgcaccctcctgagttgctgagactacaggcacacgtcaccacacccagttaatttttgtatttttaggagagaccgggtttcaccatgttggccaggctggcctcgaactcttaacctcaagtgatctgcctgcttttggctcccaaagtgctgggattacaggcctgagtcaccacgcccagcttgaggtgggggttctactccagatgggttgctcagggaaggtcctctgaggaggtggcatcacctgagtcctgaatcacaggcatgcaccagcacactcagctaatttttaaactttttgtagatatgaggtctcactctattgcccagtctggtctcaaaccctaggctcaagcgatcctcctgcctcagcctcccaaagtgctgggattataggtgtgagtcattgtgcctggccaagatgattaatttgaatgtcatatttaattaatttgcttaattgtagtaatctttttttacctgaacccatagaattttgcaggcaccatctggccaagtttcaggagtcaataataccttggaaaaatttaaaagttcattatatggtttacttttgttatcaaataactacattttttgtaaaatttattagacaatccaataatttttcttccagatttaatactactctagtgttctctgttttctcctccagatccattatttattcttctccatcttgttctgtgttcctggaagccaacctttataagctgcaggaaatggatttcctactctccaccttctgattgggcttgaccaacggggagcactggcagaagacaagcatgggaggaaaaagagatcagggtattcatttccccagatccctccctgtcctctacttaaaggtcataagtccatccaggtgtcatctcttatgtaggattctagcgacatcttctccccttgttcctttaggcttaggagtaataacacttttctgttcttgctagtcctgaggataagtgttttgtcacctcttgttgatttccctgacttcaaataccaaacactatttttttgctatttttgaactttatgtaagtagaatcatacagtatatattttggggggtaaggttttttttgttttgttttactcaataataggtttgtgagcatcatccatgctattgcataaaacagtagtttgttttcattgctgcatagtatttttcacttatacattgtactattaataaatatttgagggttttttttcccaaaagtgcatatgtgtctcttggctgtacacctaagaataaaactttgggtgacaggatatgtataccttcaactttagtaaacaataccaaactgatttctaaatgctagtacgcatttacaattctacctgaaatgtatgagttaccatcatctgtaggatctatagtgatttctcccttttcatttctgacatttctttttttgtgtccctttttccctctttcctttccttttctttctttccttccttcctttcttctttcttttttattgagagtcttgctctgtcacccaagctagagcgcagtggtgtggtcatgactcaccacagcctcgacttcccaagcttaagcaatcctcccacctcagcctcctgggcagctgggactacaggcatgtgccaccacacctggctaattttttgacccattattgagaagtatgttaaaattcccattgtggttttgaatttgtctatttcttttttgagttctgtcagtttttgctttaagtattttgaggctatgttgttggagaatctaagtttagagttattttatctttttttaattttactttttttagagatgatgtctccctgcctaggctgatttggtcttatttctgagctcaagggatcgtcccacctcagcctctggagtagctggaactacagcacgtgctaccatgcttggcttagaattagttcatcttttgatgggttgaactttttttaatgaagtgtttctatttatttatttatttatttatttatttatttatttatttatttttgagagggagtctagctctgtcgcccaggctggagtgcagtggcatgatctcagctcactgcaacctccacctcccaggttcaagcgattcttctgcctcagcctcctgagtagctgggattacaggtgcccaccaccacacccagctaatttttgtatttttagcagagacagggtttcactgtgttggctgggctgacctcgtgatccacccgcctcggcctcccaaagtgctgggattacaaccgtgagccacctcgcccggcagtctctctttatttcttttttttttttttgagggggacggagtcttgctctgtcgcccaggctggagtgcagtggcgcaatctcggctcactgcaggctccgccttccgggttcatgccattctcctgcctcagcctccggagtagctgggactacaggcacccgccacctcgcctggctaacttttttgtatttttagtagagacaggggtttcactgtgttagccaggatggtctcaatctcctgacctcatgatccgctggcctcggcctcccaaagtgctgggattacaggtgtgagccactgcgcccagctctctttatttctaataattatttttgccttaaagtctactttttctgatattaatatagttataacagcattgtttggttggtatttgcataatatatcttttttattgattcactttcttataaactttttagtttgaaataatttcaaacttgcagaagttttgaaatagttctaagaccatccatacactcttcccttagattactcatttgccttattctctctatctatcccttatatataatatatattatattagtatatgtaatttttccaacccatttgaaagtaaattgtatatattatgccccattactcttaatacttcagtatgtatttcaaaaaaaattatactctcctacattacccttacaaaatcagaaccagaaaattaatactgataaaatactactatttaaccatataaactaatgcattaactccattcaaattacaccaattggctgggcgtggtgacttatgcttgtaagcccagcactttgggaggccaaggcaggcagatcacttgagcctaggagttcaagaccaacctgggagacatggtaaaaccttgtctctacaaagaatacagaaaaattagctggacgtggtggtgcacacctgtagtcccagctacttgggaggctgagatgggaggatcgcttgagcccaggaagcagaggttgcagtaagccgagatcacgccactgcactcaagcctgggtgacagagtgagttcctgtctcaaaaaaacctaaaaagcctctccctctcccctctcccctctgccctctcccctctccctcgtccctcgtctccctcgtctccctcatctccctcgtctccctctccctctccctctccctctccccggtctccctctgatgccaccaaagttgtgaaagccgaggctggactgtactgccgccatctcggctcactgcaacctccctgcctgattctcctgcctcagcctgcagagtgcctgggattgcaggcgcgcgccgccacacctgactggttcttgcattttttggtggagacggggtttcaccgtgttggccgggctggtctccagctcctgaccgcgagtgatctgcctgcctcggcctcccgaggggccgggattgcagacggagtctcgctcactcagtgctccatgttgcccaggctggagtgcagtggcgtgatctcggctagctacaacctccacctcccagccgcctgccttggcctcccaaagtgccgagattgcagcctctgcctggccgccaccccgtctgggaagtgaggagcgcctctgcccggccgtgaccccgtctgggaactgaggagtgtctctgcccgaccgccaccccatctgggaggtgaggagcgtctctgcccggccgccccgtctgagaagtgaggagcccctccacccggcagccgccctgtctgggaagtgaggagcccctccgcccggcagccaccccgtctgccaagtgaggagcccctccgcccggcagctgccccgtccaggaggtggggggcacctacgcccggccactgccccgtctgggaggtggggggcgcctctgcccggccgccaccccgtctgggaggtgtacccaacagctcattgagaacgggccatgatgatgatgacggttttgtcgaatagaaaagggggaaatgtggggaaaagaaagagagatcagattgttactgtgtctgtgtagaaagaagtagatattggagactccattttgttctgtactaagaaaaattcttctgccttgggatgctgttaatctataaccttacccccaaccccgtgctctctgaaacatgtgctgtgtccactcagggttaaatggattaagggcggtgcaagatgtgctttgttaaacagatgcttgaaggcagcatgctccttaagagtcatcaccactccctaatctcaagtacccagggacacaaacactgcggaaggccgcagggtcctctgtctaggaaaaccagagacccttgttcacatgtttatctgctgaccttccctccactattgtcctatgaccctgccaaatccccctctgcgagtaacacccaagaatgatcaataaataccaaaaaaataaaaataaaaataaaaaataaaataaataaataaataaaaatttaaaaaaactaaaaagcaagcaacaacaacaacaaattacactaattgtcccccaaattacctttacaggcccagcatccaattcagtcgccttcaaggagtctcttcagtctaatttattctagaacaattcttcaggcttcccttctctggccaagatttttgaaaaatacaggtcaatgactttgtaggttgtcttcagtttggatttgtctgctgtgtcctcatgatttatgcatctctggcaggaataccacagaaacgatgcgacattcttctcagtgtaccatattaggagtcacacaatgtcaacttgtcccattactgctgatgttaatgtttaccacttggctaagatgatgtctgccaggtttctccactggaaagttaacagtatttagtacgtgttaagtgatgagtaatgaataaatatttcatagggagatgttctgagagtataaaaatatcctgttccatatcaaagttgcttcacccagtttcaacccaaatcaattactactacgatggttgccaagtgaagattttccctttttttatttttatttttatttttttaagacagagtctcactctgttgcccaggctggagtgcagtagcacaatctcggctcactgcaacctctgcctcctgggttcaagcaatcttcctgcctcagcctccgcagtagctgggattacatacacccaccaccacagccagctaatttttgtatttttactagagatggggtttcaccatattggtcaggctggtctcgaactcctgacctcaggtgacccacccacctcggcctccaaaagtgctgggattacaggtgtgaaccactgctctaggccaaggtttttctaatttcaacatttttttacatttattagttaatattcttattctatgacgaaacagagctttccattctccccaatgtatttattcatttatctatttatatcatataaacacgtggattcctatttttctcaatgaactacaatccattacttgatacctattttgaaagtcatactatcttagatttggccagtggaagatgcttcaagttggcagctgcgccctttagtgtgtcttcataattctttgagcatttatttatttcctggcacagcaaggtattctaggttcatcttgtacatttcttgctccagcccacaaggagccctagtccagcactgagaatgccatctataatgggcgccaaagatgttcagtgctgccagagtgccactgatttcaggcagtctcagcagacagaacaaggaactacgtcaatgtgtgtgttcagacacatacacatctagatctattttttgttgttgttgagatggagtcttgctgtgttgcccaggctggagtgcagtggcgtgatcttggctcactgcagcctctgcctcctgggttccagtgattctcctgcctcagcctcctgggtaactgggattacaggcatccaccaccatgcccggctaatttttgtatttttagtagagacggggtttcaccatgttggccaggctggtctcaaaatcctggcctcaggtgatccacccgcctcggcctcccaaagtgctggggttacaggtgtgagccactgcagccagccattttcattgttttttagtcgttcttacatttttgagcttccatctggggttattttctttccgacagaaaagcaccctatgttatttccttcaatatggggctgctggaaagaactatctttttaattttttgtctgaaaaagccttatgttaccttaatttttaaaggatgtttttgctgagtatagagttctagacaggcagcgattttctttaagccctttgagtacagttggccttctctattgggattctgcatctacggattcaaccaactatggatcaaaaatatttggggaggccaggcacagtggttcacacctgtaatgccaacactttggtaggccaaggtgggcagatcccctgaggtcaggagttcgagaccagcctggccaacatggtgaaaccttgtcactactaaaactacaaaaattagctgtgggtggtggcgggcgcctgtaatcccagctactcgggagacagaggcaggagaattgcttgaaccagggaggtggaggttgcagtgaaccaagatcgcaccgctgcactccagcctgggcgacagagcaagattccacctcaaaataaataaataaataaaaaagtcggggaaaaataatttttaaaaataacaatacaacaataaaaaataacataaataaaaaacagaatacaatctgggtgtagtggttcatgcctataatcccagcactctgggaggctgaggtagaggatgatttgagcccaggagtttgagaccagcctgggcaacatatcaagattttggtatccatggatgatcaagtcccttatataaaatttgttctgaaacaaatcccccacacatactgagggacaactgcatattattcagtgtctcctggcttgcattatttttgttgaaaagtcaactgttagtctagtcttcctttgaaggtaaaactgcccttttctctgactgcttttaagatttcatccagccaggcgtggtggctcatgcctgtaatctcagcactttgggaggctgaggcaggtggatggctgtgcccaggagttcaagatcagcctgggcaacatgttgaaaacctgtctgtacaaaacatacacaaaaattagccgggtgtggaacacaaaaaaaattagccaggcgtggcagcatgtgcctgtagtcccagctactcaggaggttgaggtgggaggatcacatgagtctgggaggtggaggctgcagtgagccacggctgtaccactgcactccagcctgggcaacagagtgagaccctgtatcaaaaaagaaaaaattgtctttggtttttggccattttactctgatgtgcataggtatacttttcttttaatcctgttataattcataaggcttctttccttccttccttccttccttccttctttctttcctttcttctttctttttctttttgatagagtttcgctctgttgcccaggctggagtgcagtggagagaccttggttcactgcagcctccacctcccgggttcaaacgattctcgtgcctcagcctcctgagtagctgggaccataggcacgtgccaccacgcctggctaatttttatatttttagtagagacagggtttcaccatattgcccagggcggtctcaaactcctggactcaagtgatccgactggctcggcctcccaaagtgctaggattacaggcatgagccaccatgcccagcaatttttgttgttgttgttgttgtttttttttttttgagatagggtctcactccattgaccaggatggagtgcagtggctcaaacaccggctcactgcagcatctccctcctgggctcaagtgatcttcttgcctcagcctctgaagtaactggaaccacatgcatgtccaccacgggtggctaacttatttatatttatttatttatttttttattttttgagatggagtctcactctgttgcccaggctcgagtgcagtggcgcgatttcggctcactgcaagctctgcctcccattcttcccgtcattggttctcccattcttctcccattggttcacaccattcttctgcctcagcctcccgagtagctgggactacaggcgcccgccaccaagcccggctaatttttttgtatttttagtagagacggggtttcaccatgttagccggtatggtctcgatctcctgacctcgtgttccgccctcctcagcctcccaaagtgctgggattacaggtgtgagccactgcaccagcctccaaaagtcttcttgtttaactgtggtttgatgatttttacctgttttggaaaattcttggccgtgctcttcaacttatcacttctgcctcatttctgtcctccacttgtatccttggaatacaagtatatgtgagttagacctcgcagaatctctatgtctctgttaggaaaggtagtctgccatgggtgctgagtgttcctgtcagtccttgctaagtgtgccaaacttcaaggcttatcatcctgtaacagtgagcaggtcctgtaactattcacataggccactaagtagatcagggcacctgagcatgactgccatgcaactgcccatccctggagtagggggactcgtgtgttcactgcttgctgaaaagatgccaggtcagttcttcagctgtgctgcaacccactgtctgtacagccaccatatggacccgcaacaccaccccaagggacttggaggcatacgtttgtatgttggggagagtgggccatggaatatatatatatgtgtgtgtatatatatatgtgtgtgtgtgtgtgtatatatatatatgtgtgtgtgtatatatatagtgtgtatatatatatgtgtgtatatatatgtgtgtgtatatatatgtgtgtgtgtgtgtgtgtgtgtgtgtgtgtgtgtatatatatatatatatatatatatttttagatggagtctcgctctgtcgcccaggctggacaggctggagtgcagtgtcaggatctcggctcaccgcaacctccacctcccgggttcaagcaattctcctgtctcagcctcccgagtagctgggactacaggccattatgcccagctaatttttgtatttttagtagagacggggtttcaccttgttggtcaggctggtctcaaactcctgaccccaagtggtccacctgcctcggcctcccaaagtgctgggattacaggtgtgagccactgcgcccggcccccaccaattcttttttttttttttgagatggagtcttgctctcttgcccaggctgggtgcaatggctaaatcttggttcactgcaacctctgcctcccaggttcaagggacttggaggcatccctgcctcctgcctcagccttccgagtagctgggattacaggcatgcgccaccacacccggctaatttttttgtatttatagtagagacagggattcaccatgttggccaggctggtctcgaactcctgacctcaagtgatctgcccgccttagcttcccacagtgctgggattacaggcgtgagccactacaccctaccggaatatctttttattagggaagagggttgctttctggctcacctataatcttctataattattgacaatgacactgcctcttggatcatgtttcccttgcttggtccctgggtgaagaggacagtcccagcgagtgtatacatggactcctggttccctataatactatgagttatgctccttatcaacaggataccatgctctagagacaatgattagaagtctatccttttggctgggcgccgtgactcacgcctgtaatcccagcactttgagaggccgaggcaggcggatcacgaggtcaagagatcgagaccatccaggccaacgtggtgaaaccccgtctctactaaaaataaaaaaattagctgagcatggtggtgcgtgcctgtagtccccgctactcaggaggctgaggcagaagaatcccttgaacctgggaggcgaaagttgcagtgagccgagatcacgccactgcactccagcctggcgacagagtgagactgtctcaaaaaaaaaaaaaaaaagtctctcctttcctttagctaccacagccaatgagatggcacaactcctaggtcagcagatcagactcttatttagagtgagacccgtcttcaaaaaaacaaacaaaaaactcaaaaactagtgcagcatgctctgatattctgcccagtcatcagccctgtgtgcataaggttattcatcacaggatggtttgtgatagcgtcagtctggaaacaattcaaatgtctattactaaggaagggactggtgaaattaactacagaacatcctcaccatggaatactaggcagctgacaaacgaacaaactccacacacacacaaaacaagaaagctctttatggactgacataagctacaaaatacattgttaaatgaaaaaggcaagatgcagaacagagtatactctcctttgagtaaaagggtggaataacatttgatacttgctttatttatatgaaatagacacctaggaaactaataaaattgacttatagtggatggatgaggtggacaatggaataaagatagaagtagaagtagcagggagactttgtttattttgagacaagggctcactgttgcccaggctggagtgtggtgacacgattgtggctctctacagtcttgacctcccagggtccagcgatccttccacctcagcctcctgagtagttgggactacaggcacatgccaccacacctggctaattttttgctcattttttagagacaaggtctcactatattgcccaggctggtcttgaactcatggactcaagtaatcctcccgccttggcctccgaaattattaggattacaggtgtcagccacagtgcccagctgagacttcttaagggatatcaattctttgaagaaatagttgatttcttgaatgacgcgaatatattacttggccaaaatattaagtagaagaaaaaatgtgttgagttaatgaaggctctgtgtaaccctaaggaacttattttcccaattcccacctcagtttccccaaataaactggaggaccactgagggctccccctctttggctcccagactttgggtacaggcccttaggactccagtctgtatctctgaccccagccctgacagaggttcagaaggggtctgcctcatttcgtgtgcctccctcctcctaaatcacagtcagggctgtcagcactttagtccctgtcctgctccctggagccactgagccaggtggagaacacctggtcctgcagcggatggagagagagagatcacatggaggaggctaactcagctctgtgctgtgcctggaggtcgcgtctgtactcactgctcagagcacactactgccagggttgggtctgcagtggggccttggagctctctttatatctcacccctcaccttctaaatggcaggttatgatttcctaatatgctgtgacagagctgaaccctccatcccagctgcaggcacctgcctctgtggagtggctactctaggctaggtacttcagcatattctctcttttcatcctcctgcagtccaatttggcagataaggaaactgaggcctagggaggttctgggctcctgcagagctaggggaggaggaaggaagcaaagactaatcaggcatcccttaattggacttgcctgggaggcaggcactgggcctgagtagagggtgctgggagctgagtgtggtcagaatacagggaacagaaaggctcagggtgaccaaggctgaatgggggtggggcagggtccctgaggacagggctgaagcacttggacaactgactacagtggggcattttcaggtctgggcttgtggagtggacagctgaggtccctgagtgggggcacaggatggctggaggggttggggagaaggtggtgaaccttggaggaatccaggagggagatgatgtgacgtcatctagggatgcagggggtgcgagaggggcaagaagcagcagcacttggtgactgatgggatatagaggttagggagaaggcggggtgagagtgatgactaacatttattggacactttgtatgtgcgtggctcagtagcaagtgtttcccatttgtcacagcacttaatcctcaaaacatcctaatagtgttggttctattgtcacccccatctaacagatggggactgtgactcagcggtgagagtcttagcagaggtcacaagccagtcctcaagtccctgggaaccacttggttcccaccgtcatctcccccgagatgctaggctgtttgtgtccaccagggggcagagagaggccgggaatttgaacgggacccacgttttcctgcgcttcccttagccttggctgtggtcagagatcttggtgatcaaggagtctgaccccctagttctcactttaccatagggtaagctgaggcccatggagggacagtgaccagctcaggtggtagaaccaatcagaggcggacgtgggccagagcccaagactccaaccccccagcagcttagaccccaaccctggatcaggtcaccccagcacctggggggtggcagcggcgacgggggccatggattccggccccagcctgtgaattccacagacaccgcggctccacacaacccacaccccactgcacacagaaaggatacggctgacgcttcgtgagcgatgctggttgtcaccaagtcactggtgaaactgggagagcgcccctggtgagacggtgtgaggattcatgcaaagcacgtgacagagggagtttcaggaagtgaagctgtcctgtgttgctgctgttttattagtaacagcaagctgcccaggcccacacgaggcaggtgtgtctcatgagtgttctacgggagaggaagtgaggcttagaggcccaagccaggagtggaggagctgcggctacgggctacggtgcccatgcccacacctgcctcaggagcgccctcttcctttggatgattcttttttatagacagggtcttgctctgtcgcccaagctggagtgcggtggtgcaatcatggctccctgcagacttgacctcttgggctcagcttcccaagtatctggactacaagcatgcaccaccacacctggctgatttttaatttttttgtagagatagggtcttgctatgttgcccaggctggtcttgaactcctggactcaagtcctcctgccttggcctcccaaagtgctgggattacaggcgtgagccaccatgcccacccagcctggatgattcttttagtccgtcattcatcccatgagcatttgtgccacatgtgctctgagcctggttctgtggtgggcactggtgccaccctgggccctgaggtgcatgagggggcggaacaaatggaaattgaggcaggctaggcctagagcctgtgggcttcctgggactgggcactgagcagtgagctcgggagacagaaggctgagcccaaggctgtgggcttgtgccacctctgcctaaccagggtttgtttaccttccacccagaatcacataatggaggtccgttcctcccctgcacagcatcctgccctcaggatagcctcagggctacccacacagatgggagctgcctcatctggggccactccagggccgggggttctgctgggaagaaggctcctacatccttgccccgctgtctgaagctggtttgggccagtgaagaggagccttccctggccgaactccttttgtcagcccagggaatatccaggtcagggggtggggtttggcctggggatcaggggcccagggtcatgtttgggattatcctaacaggcattgcacctgcataagacagtgcaggatgggtctgcacaagaccatatagaggagaggtgagcggggttgaaggccagtccacaccctgctccacttggcactgctgggggctggagcagggctgtatcagcctagaggaaacaggttcttatttctgagtcatcatgagcaccacataggttggcagtgccctgatggcaacagtccctaaagcgcaggggtggagcaaggcttgatgttggcctggagctccagggccagttgctatttgaatgaaagagttgcagcaagctggtcttttccccaaacccatggccctcaggtgttgctcaggagaaggagggatggaattggccatgggctaccacctcaggaggctggacctctcagaggagcttctagtgctttgcttaagatatgtccgccaagacccatgccaacactcttggagtctcaggggctcctgacttttcattctcccaggccccagtccagactgactctcccaaacgcccattgtggattatgtccaaattcctttgcagggccatttcttgttcaccacagacacacctgtgtccagagtgcacataagacaagccactgctctgagggggagctcctggctggggggattccaggacctagatctgtgaagccacctgcctcggacatcatggaggaggatggcagtgttcggaggctcaggaagcgcagcaccgtgcccgggtggcagttggcctggagtctatgcaatgtggggtgaaccaggaccactctctgggacgtccacccaggagagccaggaaggtgttccaggctgggccccaaggcctctctgtagcctcctgaggccatgtaaggacccaacctgtcctggcccagaagtcagattcctcagccaaggagttgcagggacaaggagaggtggccagtgtggtgggaggacgcctttgttggtgggaggacgcctttgttggtgggaggacgcctttgttggtgggaagacgcctttgttggtgggaggatgcctttgttggtgggaggacgcctttgttggtgggaggatgcctttgttgtaggtattttctcaacggtggggctgggctgcctgccaggtgccagggcgcggctctggcctcccgctgcacaacccactttgccgccaagccctgtacccggcccagcagctccttcccgcgcttccgctgccagtcccgggaaagtgagaggcaggatgtgttgggcgggctgagcaggctggttcccagcccacctggcctcatgcttctggcaaggatcctgagcctagacaggagaagggactcactcagggccctcttggtgcttggcatttagaactgcattcttccaattaaaaaatatgtacaaacttttgctcaataaaatgtgataaaactgcaatgctgaatatgagctcatacacttattagctgtatgtccacgaacaagttactacttatcttctctttagctccatctctttattgaaaagcgaggacaaaagaagaagaaaatgtaaaaatggggatgatagttgtcctacctcatgggactattacgaggatttaatgggtcgttacatgtaaagctctcagaacagtcttgcacgtggtgagggctatggaaatgtctgctgtgatcttgagcgtgatggtgaccatcagtgggaacaatgctaaccaagaatcagtggcacagaacagaaattcactcaggcaagctccagctgagagcttttaatcacgtcttcagagatggcacatggaacccgagggtaggggcagccagacctcaagaggcctgagaaccaggatctgaagaatgagaagcccggaagctcctctctgtctctgggcctcactgtctcctatccaccctctttctgcacatctgcttcactcttatacctctgagcagcacgacttcccccagttctctcatggccaaacatggctggctctcaggtctcaggtcaagtaaccagaggaagcacactggcttctctgaatcccaacagcaagattgtgggacagggaacccattgcccaatttgggtcatgcacccacagcccatggctgaggggccgccagggaccagtcccgtggtgccgagggagagcctataggctgggcaggcatccccaggggcatctactccaatggtgctctgggcagcaaagaaaccagtgtgctagtcctggtgtcactgcaggagatccccagtgtcgctgggcccttttcctcttctgttcactctgtgattgctatagtcccttgtcacagcactcagggtgtcttaaaattgtttatgtgtctgttttcctcactagactgtgattttcattcattctctcaatacagtaatcaccaagtaccagccatgtgctcaggatacagagatgaatccaactcagtgcttgctgcctccgcagaggctcagtctggcttggcatgtggtcatgtgaaacggatcgtctccatgtctggtttctcccaaactcaggtgctagagactttgtttcccacagcattgacagtgtcaagatcccactcttcatgaagtttacaagactcctgagctgttatgaaaagtgagcgtccaggccaggcgcagtggctcatgcctgtaatcccagcactttgggatgctgaggcgggtgaggtcaggagttcaaggacctcacctgaggtcaggagttcaagaccagcctggtcaacatagagaaaccctgtctctactaaaaatacaaaaaatagctgggcatagtggcgtgcacctgtaatcccagctacttggatgctgaggcaggagaatccttgaacctgggaggtggagattgcagtgagccaagatggtgccatcacactccagcctggttgacagaacgagactctgtctcaaaaaaagaaaaggaaagaaaaagaagggaaggggaggggaggggagggggaagaaagaaaagagaagagaagaaaggaaaagaaaagaaaagaaaagaaaagaaaaagtgagtgtccacaggaaatggttctgaaggggccaggcatgggcgggcatcacctccgctgggtgattgaagggcaacagtgtgcagctgacaaaagaaaaacttggctggtgcctataatcccaacgctttgggaggccaaggcaggcggatcatctgaggccaggagtttgagaccagcctggccaacatggtgaaatcccatctctacttaaaaaaaaaaaaagaaaaaaaaatttagctgggcgaggtggtgcgtgcctgtaatcccagctgcttgggagactgaggcagaagaatcacttgaacctgggaggcagaggttgcagtgagctgagatcgtgccactgcactccagcctgggtgacagagcaagactcgggctcaaaaaaaaaaaaaaaaagaaaaagaaaaagaaaaatttcccagcaagtgaggagcaggacggtgactgtggctcctcagctcgggtgacggctgtgctaactggaggccacggatgcttactggtattgctcggctgctgtaacgcaccggccctgctgctgggcatctcttgaggctgactttgctcctctccacatctttgcttccatttcaggccactctgatctcttccaaaatcaactcgtgtccctattccaagcatgagctatccctaacgagcctccctgtgagcaggatggggcagacacgcctctaggctccttccagctcacttctaaggcattaactttacactctgcctccttcagggtcattctttgggttctcaaaatcctttctctccataaagctgagcacttggctttcaaaattattcatgcgggtgaccacattgaggtctagtttggaagttgaaaaactaaatgttgttttttccccttcctttgtgcattcctactataaaaatactaattcttgaggcaatggaatgcctctggctgacgagggaaagggtcacatacaaggaagtgtggaaaagaaacagacaaatactagtatttcaagatgttttcctattacacataatcaaataattgaaaatccagtgtagtaggatctctggttaggggtgatggagtttaagggctgcagtgaagaaagcagcggactcaccttgctgtggtgttggggacagcttggaggccagtgcagaggagatgatgcttgagctaggcctggaagggatgggtaacaatttccagggaaacgagaaggtgggttgggggagagcactccgggcagcattaatgagactgaaagaacaaggactaaagaaggaaaagctaatgatgtgcaaagcactgtttgtttgtttcatttatttattttattttatttttatttttttgacattgtgtttcaaagtgtccccagtctagagtgcagtggtgcaatcatagctcactgcagccttgacctcttgggctcaagtgatcctcccacctcagcctcccgagtagctgggactacaggcacacgccaccaagtctgactaatttttgtgtttttagtagagacagggtttcgtcctgttgcccaggctggtcttgaattcctgggctcaagcaacctgcccaccttggcctcccaaagtgctaggattacaggcgtgagccactgcaccgggctcaagcactgttttaatagatacttttaaagtattaatttaatcatcacaacttttgtgggacttttaaaagatgaaactgaggcacagggtgctgggcgtggtggctcatgcccgtaatcccagcactttgggaggctgaggcgggcagattgcttgagctcaggagttggagaccagcctgggcaacacggcaaaaccctttctctacaaaaaatacaaaaattatccgggcttggtggtgcgtgcctgtagtcccagttacttggggggctgaggtgggaggattgcttgagtccgggaggttgaggctgcagtgagccaagatcttgccactgcactccagcctgggtgacagagtgagatcctgtctcaaaaaaagaaaaagaaagaaagagggagagagagagaaagaaagaaagaaagagggagagagaaagaaaaagaaagaaaaaaaagaaagaaagaaagaaaaagaaaagaaagaaagaaaataaagaaagaaagaaagaaaaagaagaaaccaaggcacaggcatgttaagttactggcccaagaattctagtttggcaagctgagacccaagcctgagatgtgtggcctcaaggctgggcacggtggcttacgcctgtaataccagcactttgggaggccaaggcaggtggatcactttgggagttcgggagttcaggagttcgagaccagcctggccaacatggtgaaaccctgtctctactaacaaaataaaaattagccaggcctggtggcatgtgcctgtagtcccagctactcaggaggctgaggcaggagaattgcttgaacctgggaagtggaggttgcagtgagccgagatcacaccactgcactccagcctgggcaacagagcgagactctgtctcaaaaaaaaaagaagctctaaaagcctcaggagctctaaaagccacactattctctgtattgaagcatggaaaatagctttgtgatggcaagtgggggatttggctgaaggagtgagcaggataaagacctcagaagacctcacacaccatctaaggcactcagactggaggatcctgatgataacagggagtcagtacaaacgcagaatcaagaaagagacacagaagatgctattagaaggatcatgggttgaagagggtaggaccagaggcggagaccaattaggaggctgtttgaacagcctagaagggagatgacctggcctgaagagcaatgacagctggaacaggtgagttctggaatggtaagtggtcaggatggtgtggaagatgtccacatcctaatccccagaacctgtgactgtcattttaaatgacaaaagggaccttgcagatgtgactaaattaatgatctagagatgaggagattattttaggttatccaggggcccagtgtaatcataggggtcctccacaacagtgagtaggaggaaggcaacatgacggcagacacagagatccaagtgatgtggctataagccgaggaatgcaggccacctggaaaagctggagggcggggagtggactctcccccagagcctccagaggaactgaccccgccgacagcttaagtttagtgcacaaaattcgtttcagatttctgatcaccacacctgtaagaacgatcctaaatttgtgttgtgttaagccataaagtttgtggttaagagttgtccctcactatctgtgggggattgtttccaggaccccctaagtatgcccaaatccatatactcaagtcctgaagtaatggcaggtacatgtggaatccactgtatacacaggcctcgcatcctgcaaacactgtatttgtgatctgcagttgaaaaaaatctgtgtctaagtggacccatgcacttcaaacccttgttgtttaagggtcgatggcatttgttacatcaacaataggaagccaatacagatggttaagactttgtgaccaggtggttatcaaagaaggaaagggaggggtcccagaaagggttgaggaagaggtgaggattttggcttgggtgatggggctggcagtgagactattacaatcaggactgtggatagtgaggagggggtggttggggaatggtgggatggtaacgtgtcctgtcttggacatggtgagtctgaagtgtgcatgggacatccagaaggaaggtctggaacctagggcagaacttgagagtgatcagtacacacaggctccaatctgaaaactgctgggagaacatgtggccaaggacatgggtttccttttttggctcatactctgtgatgtgagaccaaaagtctctcctaaatgcagctgttgggcacttaaaccaccctcctagcacccttccttactcacttccctctttgacagtgaatagaagccacatagactcttccgaggagtacccatgtgtcacttctgggacaggcagcctcactcctgccagggccgtgcagggcagtccacaggccaaaggtccaagtagattcagcgctgctgagttgcttctgggtaagctctgctggctcctgaagagccacccctgtcccacgggtgcatgcgaagacgctttttagtgtgtgagccagtttaactcaagctatacctgtggacagcaccaaggtatttctgatagtaacagaaatatctgaggggaatttcccatgggtcaaactgaacatgcaagcactgaagacaaagggcacgggataatagtcacatatcattaaaaaacaaacaaaaaagcctgctcatcctgcagaacaggtgggagccaaagcctgagagtagatgagatcattcagggagggcttgcggcccaagagcagaggagggcccaggaaaccgatttctctaaggtgggcaaagtgagggacggggaccatgacatgttcatcttcatatactcagggctgatacacagtaaaaactcaaaggatgcttgatgaatgaattcatttctattttatcttctgtaggatataaaaaggaaagaggccgggcgaggtagctcacgtctgtaatcccagcgctttgggaggctaaggcaggaggatcgcttgagctcaggagttcgagactgggcaacatggcaaaactctgtttctataaaaaaatacaaaaattagccaggcactgtggcacatgtagtcccagctactcgggaggctgaggtgggaggatcacttgagcccgggagacggaggttgcagtgagccaagatcgtgccactgtactccagcctgggtgacagagtgagaccttgtctcaaacaaaaacaaaaatagaaacaaaacaaaggaaagaaagagaatgtgggaaaatgcaaaaccaaaacccaaaaaaagaaaaaaaaaccagatacgtttattatccaataaactgaattgagtatttaagtttgaaactggattctacccagaaagcacttaaaatgtaaacaacatgaatataaagttatcttaggaaaatgaaagtctgaccaggaaataaatgcaaaatcagttacctttaagataacctcataggcccataaaactagaaaaaacaaggcaacaaggcccccagctggtgaggctgtggggaagcaagggctccaccagccccagatgagaacaatgtggccgtcgaggccaggagcccggaaagtgcacaccctggaacaaggagccttgggggtaaacataaatgaaatgcacttaggcgaaaatggaaatttttacaaggaaatagaggtatctcaggaacccaaggaagcacactaggcctcaggagggtcgggaccgaggaactgggaagtcaacaggaatctctctctcctttcctcatctgggattccctcctgcattgtctgcttttctccttctctgaagatcagccttctctgttttgtagtgcacccattcataacaacaaatagttatttcgtgtgtatgaccaaacacagttcttgtatttctctgttcaagtgtacccagctaggactgagctgcaatttgaaattcctgggaggagtgtgattggcctggctggccctccgctggtctaataagctaggaggcagggtagtcattcctttatgaagttatgatctctgattcctttttccacaggaagataaatcagtgaatgtgataagataagatggggaggggatgccccaaggcagagagacagctcaaaacttcgagctccaggcgctggttccagccagaacatcccgttaacctttttcctgcttccacagtccacatccttgttatgcctttacagtctattttcacagagcagccagacttatcttttagcgtgtaaatcagatcatattcctcccctcactaaacgaacaaaccagccagaaaactctttaactccttcctttaataaaatccaggcctggcgcaatggctctcgcctgtaatcccagcactttgggggcccgaggtgggtggatcatttgaggtcaagagttcgagaccagcctggccaacatggtgaaaccctgcctctactgaaaatacaaaaacaaattagccgggcgtggtggcagctgcctgtagtcccagctactcgggaggctgaggcaggagaaccacttaaacccaagaggtggaagttgcagtgagctgagatcgtgccactggactccagcctgggtgacagagttgagactctgtctcaaaaaaaaatttttaaattaaaaaataaataaaataaaatccaaagtccttatctagtgcctggctacttctctgactttgtcttttacaaatcaccctgtcattcactcttctgtagccacactagccttctttctagcttgtaaatatgcccagcccaattcctatctcagggcctctgcatttgctgctccctctactccatcttcttgtatgaccaactccacatcattccagactcaggtgatgccacctcctcagaggatcttccctgagcaacccatctggagtagaacccccacctcaggctgggcatggtggctcacacctgtaatcccaggactttgggaggccaaggtgggcgaattacctgaggttaggagtttgagaacagtctggccaacatggcaaaaccccatctccactaaaaatacaaaaattatccgggcatggtggcaggcacctgtaatcccagctactcaggaggctgaggcaggagaattgcttgaacctgaaaggcaacagaggttgcagtgagccgagatcacgccaccgcactccagcctgggtgacagagtgagaacgcccacctcagcacacacacacacacacacgcacacacacacacacacacacaccaataactctctaccctgtttttccatttttcataggacttcatactgaaattttctttattgcttgttacttgcattattttctttctccctatgagaatgtaagctgcatttgggcagaaaccctgtctgtattttcccagcagcagagctaagcctggcacttagtagacaccaaaaaaacacttgaatgaatgactgaacaatttaatttcaatgttatactgaggcagcacagcgcagcacttcagagcaacgactttggggccagaccacctgagttcaccagctccccatctcctgcctgcataaacttgcacacattgtcttactaatctgtgtttcagttttgccatatggaaaatggggtggagggggaggatagcagtacccatccttcagtattgttatgaggattaaatgagttcacacatgtaaagggtttgaaagggcttgccacagagcaagcactcaacatgtcctcactcttattattcactattaatcatgagtccactcagttgaattatcaaaattcatctttcattgttctgccctccatagctcctcttttatcttattttcatgtcttttatcagtttcctgtgttctgggagaccatctgaagtttgttttctttactaaattgatcttctgtgttggacctggcattcgttgcttccatgcagttttaattcagcagccatgtctttaatcttctcctaatctcttcttatcccagattattccagttgtaggattgctggttctaagtgaattatgtaccatcttttgaatcctactgaaacttcaatcaggtatcacctacattttcttctattatttgcaacaggtctattttcagaggtaggtactcctctaaatcttcagagaaaagctaaatcacagtctctgcaactgcagactgtgccttacctaatccttctggaaggaggtctctacaaagggtgactgatcatcttggtttgcccccactgaggggtttctcaggacatgagactttcagtgctaagactagtaaatcccaagccaaacaggatgacttggtaaccccacctgtagacagtgtcaaggaagagctgtattatattaagaaaaatggtcttccaaatctttcacaaaaggaggaaaccattttctagtatttagaatgactagctccttccaattagcattttaaaatgtgaaagtctcttagaaagggggaaaaaaaaaaacctgcttcaaccccaagcctccctttagcaaccccctctccttcctttcctaacttagacactcaccactttctctcctcccattcactcctcaaaccactggaatatggcttccattttctaaccctcagctgacccctcttttaccaaggttaccactgatgtcatcactaagaaccaatggatacttctcattccttattgtgcatggcccctacacacttccctgcagaccactcccttctcaaagctctgtaaaatgctctgttaatgttcaaggctctgctctagattgtttctcttctcactacaccccctgctcgagtgacctcatcttccacggcttcaaataccgtcaatactgatgactctgagatccctatctccagcccagagtgcaatctgggctcaactcgaatatccagttccatgaggattctctacagatgcctcaaactccccaagtctcaaactgaactcatcctcaacccaaacctgctcctcctccagtgttcttatcttggccaaaggacttggccactgtctaatcaactgttcaagtcagaaacctcagcctcattcctgaccccttcccttccttcacctccaacatttcatcaagtcctataaatgctacctgctaaatatctaaactgtcccctgcctctaggctgtctgcagccaatccattctctgcattgcaccagagtgatctctccaggaaacacgtctgatgttttctcgggattcatggtttacagggtcctctatgacctgggtcctgcagacccctcctgccttttccccgaacactctcctacctggctcctgcccattattctcaggttttttgtttgtttgtttgtttgagatggagtctcactctgttgcccaagctggagtgcagtggctgattttggctcactgcaacctctgcctcctgggctcaagcaatccccctgcctcagcctcgtgagttgctgggactacaggcacatgccaccatgcctggtctcgaactcctgacctcaaacgatcccctcacctcagcctcccaaagtgctgggattacaggcgtgagccttggtgccaggcctcatgttttttcagatgccatttcctcaggaaagccttcccagactcttctagaacgagtcaggtaaaatcttgtgtattccctaaacgactctattacagcatttatcatattcactgggatagcatgcaagactccagctctctgaagacaggaactgtcttgttcactgatatatctctagcacctagaatagtgaatgataagcactcatttaagtctgttgaattaataggtattcctaattataaagctgtttgactcctaaagtcctctacttgccttcatattagtccagaactggttcaacttaccacgtacctgatgaaaaatacaactactttttaattcaaaataactagaagtggcataatccagtaaaaagaacactactgctaaaccaggagaccagggttccaggcatagctctgctacttactaactctttgtgttgctgttggtgacttacttaacctctctgggactcactttctctgtctgctcaattatgtggctaatctggatcagagattttcaaagtgtgtcccacagccggggggcggggaagggggtgggcactaaatcagagggaccagaagactgtgcaccctacccagacctgaagccagtctagttcagtatatattatatattgcaattcatgtatgacttgggagaaggaaaaaaaaaaaaggatccacagctaaaaacaagtttgaaaacaactgaaacatgatcaccgaattctctgcaccctttacatgctgatatttaaaacaacagaaagccacgaatgtagtaagaaggtagttttgccgggcacggtggctcacgcctataatcccagcattttgggaggccaagacgggtggatcacctgagatttcaggagttcgaaaccagcctggccaacatggcgaaaccccatctctactaaaagtacaaaaattagccggaggttgcagtgaaccgagatcgcgccattgcactccagcctgggcgacagagagagtccatctcaaaaaaaaaaaaaaaaaaaaaaaaagaaggtagtttctaaaaagcacttgaagagtctgactgccaaagttcagagagagtaagctgacacttttgtctgccatcaggaacccaccagtctccaagcaacttgacttcattatgcagatccagcaagacacagagacatttttgaatccacaaataacttctatgtaagtctttataccttggagccggacacagtggctcacacctataatcccagcactttgggaggtcaagacgggagcatcgcttgagaccaggaggtcaagaccagcctgggcaacatggcaaaacctcatttctacaaaaaaacaaaattacctgggcatggtggcaggtgcctgtggtcccaacctccctaggctaagatgggaggatcacctgcgcccaggagtgccactgcactccaacctgggtgacagagtgagaccctgtctcaaaaatataaaaagtctttatacctcgatccccttcatattaacaaggaggctcaggcagaaggcacagacttaaatggttttcctttatgccttgctttcaggtcatttgtcacttcacttctggtgactcagagtctgaccccagcctcacacttgataatgcaccatgcacggttcttgcagagatagggccttccttttgcatgggaagtactcggtagttacggtgcgctagtcagggttgtagtcagaggacctggagttctctcatctgccacctactctgtgtcactgctatggacacctattatttggtctactcagcaccaatcccatccctgccctcttcctgaaaactctcgtgttccctggcttcattctatcatactgttctacagggagggccatgttcttagatggtacgctgtccttcttaatccaagggtagacaacagaattcagctctactcaattgcgtcttttcctggggcttttaaacttgggatttggtccacttcttttcagtgaagaaaagctgtaagatgtgaggtgtggcagcttccaatgaccacgaccacgtgaagaaagctggtttgcatggagagaaacgtgaaatcggcacgctgagaagagatgaggcagtgctggtagtgtctgagtccttgggagcaattgttcctgaggcccagctgcaccttgcctgtcctttcaggagaagctcagttgtttgacttttagattccataagccaacaaatcgtcttttatacctaaattagtttaaactggctttcaatcccttacaactgaactaacaccaaccctgtgttaagtcactgaaatactgtgagtctgtttcttcatttgtagaaacgacctcaaatgtttttggcaaatactaacaagatatgtagttttgttaaaaccatactgggccataaatttctaaggaatgactactacagatatctcatgatgaagataatggcaagtaccacccagaaggcatatggacttagttaagctcagccctgctgctagaaaaccaagtgtcttactgactagcagacagcaactccacagtggacacaaatgcttgtctgcccaggtgccctcccctcctaccaacccgctcacccttctcctctgggaatcactccacctccactccatcctttccatgggaactgtcctgtcctttcaggaatccatctccagactggctgatgggcctcaggataagcactagactcaagctgggctaaaagatccctttcctgggacttttacttttaaaaaatggtggtaaaattcacttttaagcttatagttcagtaatgttaagtgtattacagtatgaaagtgtattaagtagttttaagcgtatagttcagtggtgttaagcatattcacattgttgtgcaactaatttccagaacttttgcatcttacaaaactgaaactctatcccattaaacttctccatttacccttccctccacccccagccaacaccatactgtttctatgaatttgactattctagatacctcatgtaagtggaactataccatatttgtcttttggtgactggctttttttttttttttttttgctttgctgcccacgctggagtgcagtggcgccaaggctcactgcagccttgccctcccgggctcaagcatcatctcacctctcatccccgagtgctgggtaataattcttttatttttgtagaggtgggtctcattctgttgcccaggctggtctcaaaactccaggctcaagcaatcctcccacctcagcctcccaatgtggcatgagccactgcgcccggcctgactggctttcatgcagcataatgtcctcaaagttgtagcatgcgtcagaacttccttccttgctaagggtgaatattccatcatatgtacttacattttgtttatccactcactcttatttatttttgagatagggtctgcctcattctgtcacccaggatctggagtgcggtgacacaatcacagctcactgcagccttgacctcttgggcttaagtgatcctcccacctcagcctcttaagtagttgggactacaggcacacaccatcacacccagctaatctgtttattttttgtagagatgggctcttactgtgttgcccaggctggtcttgaactcctgggctcaagcgatcctcctgccttggcctcccaaagtgctgggataacaggcacaagccaccatgtgcagcccttagattcacttttttttttttttttttttttgagatgtagtctcactctgtcgcccaggctggagcacagtggcgtgatctcggttcattgcaacctccacctcctgggttcgagtgattctcctgcctcagcctcccaagtagctgggattacaggcctgcgccacacccagctgatttttgtatttctagtagagacagggtttcactatgttggccagactggtctcgaactcctgaccccaggtgatccacccgcctcagcctcccaaagtgctgggattacaggtgtgcaccaccacacccggcctagattcactcttgatggacaactgggctgcttctaccccttggctattgtaaagaacgctgctatgcagaacaagggtgtatctccctgagaccctgctttcaggtctttgggatatatccccagaggggggactgctggatcatatggcggttccctttttaattttctgaggaactgccatactattttccacagcagctgtactattttacattctcaccaacagtgcaaagggttccaattttttcacattcttgccaacacttgttatcttctgggttaatttgttttgttttgttttatagcagccattctaatgggtacggggtgtcctagggcttttgaacttagaaccagagaaaacatccgcacaatctgtccccagttgtcaaggccataagaggtgaaacacaggtgctactagcagccctgtctcctgccatgtagagaaagcctgtttacagtgagagaggagtgagctgatttgcagagaaaagagaaagtctctaaagcctcagattgggtagtacaagttgtggctggagcctagatactttcctgcccttgaatttgatgagacacctcattaacccaatcataaatccacctttttacttaagttagagttgtttcatttgcaaccatgattcttgccataaacatctttgtacaagagttagttcttcagtcttttcttttttttttttttaaccttttcttcctttgattctttcttagaagtagatgggatataaataatttgtacattcaaaaaccctaaatttgtacattcaaaaaccctaaagaaatgcccttgcagaagtagagggttgtggttagagtatgagtttggagtcagcccaaactggcttcaaatcctagctcaacaaatgtttatgggatgtgttaactaacttgatggtggtatagatagatagatggatagacagatagatagatagatagatagatagatacacacatacatatatacacatatataaaatcactttatatagtttaaatatatataattttatctgtcgattatatctcaataaatctggataaaaataaaaggctgacttcaagtaaaaaaacaaaaacacaaataagtgcttttaagcagcaggcccttgtagatgccagggataaagcagtgaacaacagacaaacatcgctgccctcaccaagctttatctctgctactcggcaaatatttgcatgtttactctgtgccaaccactgttcattaagctgtgtttataaaatggtgataacagattatcttgtccgtttgttttaaggaatcattataacgtatgcatgtgcttgatataatgcctgacacacagaagcactcaacacagagaagccatgtctacgtttagacagggaggtgtgtcttgcagaaattagcctcgatatacattgggtgcccactatatgttccacaatcatcttaaaatagtactcagatcctggcagaatttactttccagtgggaacaagagataaataacaggtgctatgagctgtggcaaaataatgagccagaacagactctggagccacccacctattttcaaatcccagcttgcccttgggaaagtcacctaactgctctactcagtttcctcagttgtaagacagagacaacaagaacaatgacaaaactacctcatagggctttgtgaggattaaatgagttaatatgtgtaaaagtgcttaaagcagtgcctagctcataggactacctaagcaccagctaatgttaacactattacgtattaactgctaggaggagaaattaagtctccctagagtcaaagaagctttttctaaggagaggacatcagatctgggccttgaaggatgtgcaggagttcactaggtaaagagcaggggaaaggacatttcaagggaagaaaacagttcaagcaaatgagctgacccatggaagaaatcatatcattgaaacaaacaaaacttaacagctgaagcctaggtgggtggcagctgaagcccgaggcaccgtttctggccattagtactatagtccaccaaactagtcagtcttaagtcagagcttgccctgataacttccaagaaatgataccatatcataaaccaacattttaatagcattaacaatttttccccaatgaagcaaataaatccaatttgtacttaccatttactgggcactacagtgccaaaacactatgctatttacaacaggacctcacttaatccttaccatgtcccgtggaatacagataacttcattttatacatgaggaaacaggcttttaagcaatattcccaagatcacacagatagtatattagaaagtaaagtgttcagctgcaaatacaaatagtggtttctttctccccctgtcccctccctgccacataaagtctgaaagtaggcagttaagtcattagttcagttattcaacaatgccaccaaaacaccttccatctttcctccccaccatctttacagtatgagccactggccctgatgtttatacagtctcccattccctataatgctttcttattctcatcttaaagtcctaccagccaggattttctcaagctttactttttgaaatatttcagaggtcagctcaatacaactcactaatttcacagatggagaaatagatttgcccctagcaaactgagttaaattaattagttaaatgagcctggaattgagtgctccttccatgataccaatctagtggtgactgtaagttgcccaccaaaacctgtcctcccattccttcttggcacatggcttgactacgtttctcagccttcctggcaggtaggtgtggccatcgggctaagtcattgccaatggaaagtgagaatgtaggcagaagtatccgtgccactgcagggtccaggccttgaggcagcgggtctacctcctccctgttccttttccccttcccatcagctaggaccagtgatgacccagcttcaagcatgcagcagatgaggacaatgctccagaggatggagaagcaacatgatacgaggaatctgtgtccctgaatgaccatttggtgcacagctgccccaatgacctggatcactcacttcagacaggttaattcccttcagagctgttacgtgagaaagaataaacttctttgttctttaagccactgtattgttgagtctctttgttatagcaacttagccttttacctgaactaatacaaacatgcagcttcctttgtaagcattcagagtagctttacaaataaccagttagccatcattttagaaaacagccttaactgcccaagtaggtgataatcaaatacagaaattcctgctggtggctatcccaaaatttcttcatcctggttaaaaagtatttaacaattgaagcagatcacttatgtagagacctacttagtttttatgctttcatgcaattgattcaacaaatatttgactgtgtctaggtgctagggatattgacaagtcactgcattcataaaaggttgatttcatgcatgtgtgtttgggggagggggttgttagttttattttctttttgagcaacatggtcttgctctgccacccaggctggaatgcagtggcatgatcatgtttcactgaagcctcaatctcccaggcccaagccatcctcctacctgagccttccacgtagctgggactataggcatgacccaccatacccggcatgcatacatatatatatatgtaagtatgtatgtatgtatatatttgtgctgactgggtctcaccatgttgcctaggctggtctcaaactcctaggcttgagtgatccttctgcctcagttacccaaagcgttgggattacaggcgtgagccaccactcccggactgttattttttaatgttatactgggtgttttgttttgttttaagcaaaaaaatcctctttggaactaaagagagctaagagaggacaaaaaattactgagagttaggaaggatcaagccatattcctggaatacagatgagctgttctcttgcttagccctaagaatcaagcaaagtattttcaagtctagatctctcttcagaatcaaagtactttctacccacttacaacagcactgcctgaactgtgagaagtatctaaagcctaatcaagatttttactgacagaagcagatgaacctaatagctcactgagtattggaattaattgccaaagccatttagatagcactgctggtgtgatggactggaggctctggatacctggactggagggctctgcttgccttgggattgctatggccagatggtacaaaatggcattcctcattctcactccaggctgagcaaatagcccaaagctctatggtacttttcagctctcaaatgagatttggtatgagatttagtaatagagtaagaaaggtgatctaaggtttgtcccagctttgccttgctctgtgactggaacatccatgttttaggcctcagtttccccatccatacaagagataaagaattctttcatctctacatttacgaccaccacaagacaaattactttccttccctacactcaacagcgaagtcattcataggggagcaggcacaaaaggggaaatctactcagggcaatgcttcagaccagagcaccaggcagatttctagtgagtgttctgcctttcccaggctctttgctgctgataaaggaatttcatttggctgaatttacaatttctaagaatatgaacagtgggctcaaccacactgccttacacttagtaagtgcttcataaatattagacactttttttttggtaaaaaaggcctgatttccaattgccatagagataacaatgagttcaatgagaagttactgctccaggtatttcagatggaaggattaaaagctttttgacgtacaattattaaaactagtttttcctgcttgtctactgaaacctttttaggctttaaaacatacttagcaacttgaacgaagaatatttcagagaaactaaaggttcttccctacaaactgccagcttaacacagtgcttaatagcttgagtctaccagcctcacctcaattccagctctaccgcttgctagctgtactccattgctgagccttagtttcctccctggttaacagcaaaggaaacagcatctccctcccagggctgtgtgagaagataacatataaaaacgacttggcactgcttggctcacagtaagtactcatctccactcccaccgggaagatgtggcttcccaccttgttaggtcctaaagtagttaataaacttctttgcccagagaataaatttatttttgagattcaaatcagttaaaagtgggtgaggctctggaattcagcactgtttaaaaaggtcaatcaagttagatagtttttttactctaccttctcctctatgaagtcttatatgcataggaaacaaaacatttatcaagaattgcttttcaaggtgcagcagaaatgctcctccttccatgatcccttcccttccttctaaactgaaattctacacagctcttacggcctttgatactgtcttgcctggattggtgtttgtgtacacatgcaattatttataagctccctgaaggcaagaaccacatctcatctctgcattccctttagcctaattcagggcctctcatagagtagattctgcacaaacaaaatgtatttgaatggggagttaacgcttaaagggcacaaagtttgtttggagtgacaaaaacgttttggaaatagtggcaacgattgcacaacattgtgaatgtagttaatgctgctgaattataccctaaaaatgctatatttgatgttatatataaataagtatctgtttaacattgctggcagctcaggtcactccagaaagagggcttcaattggaagtaatagatctccaataaaagaccctctctagatgtcttcaaggactataacgtgttaaataaacacccgctacataaatgaacagacagcatgatctacaaaaagtgtcaaatttgagaaaaagctatcacattgataacagagcatactgtgtataaactaggcatggacttgtatatctttttaaggatcaaagaggctcttgtaaattttttctttatttaaacttcaataaaaatatagatttgtaactcaatagaaagacagcagtgataataactcacacatgagcagctcgcaaatttcaaagtctttggtcttcaagtcctatgtcacagcttcctcagtctgattccctccttctctgtagaattctgagaactagtttggttcacttaatcatctcaatggagatggccctttcctgccattcactcaaatctagaactcccaatatgtggctcacaaatacttcagtcatctacaaaagcatctggaaattagataattttagccagagtcagggacataaaacttctttaaagggatgcagtcaatcctggtattcaccacaaagaagatcctcatgtataaaaatgtggaatctgtgctgcttttaataatagaacctttaaggttcaaagaaaaaaaaaatgctttcctgaactacatcatttccagacacatcagccacacaaggagctgacaagacctgctgtttctattatagagaacgtgagactttaaaaccacatcaaaagaaaatggtgggagcttttctgctatgcagagaattccgcatagcactcctttgcccagactgggagacaaacatacccctccctcctgaactggatccccaccacctttccaaaggccactggacatgtctcttaaacgctgcatttcagctcttgatcattctgccctggggatcccttctctttaggttctttgttatggtctggggaaacactctgactttctatggtgttgacagcatctgagtccaatcttcttcttttcttcagttggttcaagtgggatttggattttatgtgcgctgataagacaaaatcaaaccaaacaaacaaaaaaactcattaggaattttctagaattaatcctagaagcaagtaaaattaactatacaatgcttttcttcaacaataaacagcaagatcaacacatgtactagtatagctgcttagcatttttaagggaagaataaattatatggccagccagctagcaaaatagagtgagctaccacatatcaagtgctccctgttaggtactttacatcaccaatcctcatggcagtcttgtaagatggtactattctgctcattttatacaagggaaactgaagttcagagaggtcttacaaaatgtccaaggtcacacagcaggtaaactcttctacttagacctatagctccaaaaagagatcccactttccagaatcaggtctctgtagtatggggcttcctgttatagatgcatttttaacttgtaaggttgaaaagttagaaattcaaatcctcatctgtattgcagggcattgcctgttgtccttcctggtctggcatccctgtgcctgggtcaaaaaggtcatgtgaacgactctctggcaagattcctattctctaggcacacactgctccagggagacaggaaggtgcatttatcaccgacgatctcttctgagggtccaagaaggaagtcaagctttagggccactgttgcctgctatcaactgctgacctgtcacccctaagacagttcccaccttctgactaactcatacagatttattttcactatcctgttcttttttcaaggaaatctcatctgggaacactgaaagagatggacaactagtttaaattctcttttatacatattaaaaacatcatttttaagagtttagaagcaagaataagtaaggtagaggttagaattaagagaaaagtttacttggggaagaagtcagctttgttttccagctagagcctaaggcaaaaaacgggcttctgggctggctctccatggcagcaggagatgggagtaaggacttgacagatggcactacagaagggcttacacaagctaagctcacaaaggctcacacatgttgcttctctaaggctatccctgaagaacattcaacaaatcgaaccactaagtttcctttagaaaaaaacaatcagacactctctttctcttcccctttcatcattataaaccaatgacaatcgaggcttcttctgctggttgggcaatcacagccgtccccagtctctgacaatggagttcattttgccagttaccagttaatagacctaatcatcctattggttgctttggggagaaaaatctacttctctgagaatcccatgcaaaacagtactctgaacagaaggatcccagctgctgagtaaacgacaagccccactgtgcctgaaagcagcaaaccttacacctatttctaaataccatgtaaactcaaggcttggggaagaagtcctgggctttgactggatgactacagaaatctgaaaatccaatgatgtgtgtgcagtgtgactctgtggcagaggcagatccaggctctaatgcagggatagagccttagggtggggctggccctgaggtggtggggaactaaccttctttatacatgtgtgacaggcttactttcacacagtttctcttaacttctttttatcacagttttagcaactaccactatgccaacaattacctcaaaagttactgaagagataccacttttaaaaaccacactcaggagtagtaactctacttcctgccccctcccagctatgcttctgcttcttccagtctcctggatgagctgcctggcttcccttacacccttacttcctgatcccacccccactgaattataaacatgaaaggccaagaaactcctccaagccaggaccacaaagtcaaaggagctctagaaagttaactgcagatctcttagtataaaatattaattccagctgaagatggagagcatctgatcttcctctgaatctcagaatacagagacaaattcccagaagcctccaaggaatttgagcacaggctcttagaggaatctagctgtccctttacaaataaatagactccaggttcaatctgccaaagactctaaatttcatgaagtcaatgtgaacccacccttatagatttcttcatgcccctccccatactctacctgcccattcgcgatccccaatgatgattcgatcacagaggtcacacaggtgataacttctcttgttctcagcttcattgtatggcatctttattggagtggctgtaggcttgtggccctaaaagaacaagggtggaagggagtattcaattcaaagagatctggatataattctctattaagggaaatgggattttcctaaaattcctttttctcaacccagagagcagatgggctgtatacagattttagcaacaacctttctgaatgtaaaagtagaaaagcagtctccaggtattaaaaagcagccagcccttctgctttattctatggaaaagaaggcctggttcttcaatatagcaacaaaggtgtcagctaatgaaagtgctctgaaaaccagaaaatagaatgtatcatgattcataattacctggatgaaactttgcacgatttcaagagcaggttcaagaacagactcttcccacttcgagacatcagatacctctaagccatagacaggggggacaatgggaccaggtcctaatgatgacaaagaaaggttgtgagaggtcagcctcaaacccaatctattctgcagccaggactctgaaatcctccagggaaatacacagagccaaaggagtaaacattctgaccatgctgttaattctaactaaacatgaaccacaatccaagaaagacctagaggtttaactgctctgcagctagtaagactagctacataatctggatacatgggtgcaggatcttccagatcagccagaaaaccagaatagagttaacagctcaagtgaccattgtgtgagctacaacacaaagacagcacatcgtaagaagaaataaactaacagctttaagtaagtgcctattctaagttccatatcatcttacaatgatggcgatctgtggcaagagaattcacagctttctttaggagcagatactagtctcgggtttgcatatattccctcagcggcctgggactcatgaaatgctctgaaagcatgggctgggaacagaatcatatcaaccaataagccgcagaatctgcgaaccagaaagaagtcttagaattgatgtagttgagcaacttcttttaaaaacctgatctagagggtattcaagaaacactccctggcagacacttttgaatgaagatgagactgaaggtagcaaagagtgcagctacaggtatttcacccacctgagccaaccatgttgcaagagtttagtctctgtggttagcttccctgcctatatacacactaaactgccttccacaactaggttaagtcagttgcctaaaggcaaaggagcatcgcccatgggcaaaaacatcaaaggccttcggatgccaacgactggcaggtgctggccttttgattgtgccaaccccaaataagattcttcataaactggactgggctgcacctgctaccacaggaaaggtgagactaggagggtgcaggcagcatccacagcacacctggccttggctaagctctgcacctgtttccaggccactctacattttcctttctcctctaagccctttgttgggcttctgtgccctgtctaagcacctttcaacaagttctcggctcccagctgctatttctggcttgggtccaaggccatgctggggtggggaagtccccctggcttcctgccagaaccatatcccagcagaccagccctggccaatcacgcacagctcctgatttacagggcagctgtgcctttcactccagcaccaggacgatgccggcatacacacgaatgaggaacaggcatatgacacactgtgccatcaactcctcctaccacagagatggaggaattattgtggttttactacaggaagaagttctaaattattacccaaaagtcttctgttaaaggcttattgtcagacatggggataagagaagctgcattagaaatttgtaatacagcactgagcttcaacttcagatgacactaagacttctatctaccaggacatgcagagaaaacaggataagtagaggaaagcacaacaagcctcttcacaccagaactccactggagagctcaggcagagagtgggagctgggagaaagaatgttagcagtttagtggtcaacagcagggatcaaggtatgtattttcagaggcaccgagtggggcagaggcttcagctggccctgtctgtaattgagagcagaagtctaccagcaaaaggtaaacacaagatgattcagaagcatatttaaaacatgtccacaagataaaactgaagtttcacttatgcttaaattaatctcctttagctcataaccacatagtttttacccatggtccaatactaatgctgtcttgctaaagttacagctaaaggaagtaagagtagtataaaggagtgtggactctgtgtcaggcctgcattcagttatctactgccgactagctgggtgatttttggcaagttatttaacttcactaggccttcattttcttatctgtaaaaataaaagaataacacctaccttgaagactcaataatatatgtataacaccaaatttagtgccaaagacacagtacagggccaaatcaatgagaatttcctttcttttccctcaaaaatgctgttcaactaaagtttcatttgaagcaatctgaagcaccatgtggagacgctgggagaaatggtgaaggtgtctttttatacaactcatctggccccccaaaaacactgtaattaggaaatcttccctacagaaatctgactgctcttcaggtacaaaactgaagctaaaaatcagccctgaacaccaactctccaaaaaagatgctgctgttcttcttagctgtttgcagccagtatccatctgttcaaggcagaaggcagactcctcaatgcaaataattttttttttttttgtgacatcccaagaaaatatccctggataatcatttatgttatagaacttcccttaggtcagatccaaaatcttagaacaggcccagaatctaaaattcattttctgggtgagctgaggacatctatattctattgaaaacagacccataggataaagaaaaacatgagacttactgctcaaaaaacggtttttaacccatcggttttgtttccgggcatatctcttagttacttgtttcagagcctcaatacctgaaagatacagtagatttaagaacatctaggtaagcactccttaccctgcagagaggcaggccctcccagcccagcaggaaaaagtcagccacggcagtgcaatgtcagacttggtggacaaaaatctcagttctgagctgaaggctatttgggacgctttaagccttggctctttctcagaccataccagcagagtaccctgccacccaaagatgtccaagactagattagatggaagaattcacacctttctttagaagctggttactagtctccagtgtgcattttccctcagtgatcaggtactcgtgaaattccttgaagccaattgattggaagataccatgttgatagtcctggctgggaacaggagggtatcagcagataagccattgctcctaaaagctagcaggggctttggagatggacctagttgagccatttcatctgtcagataaggaaattgagatcctgagcagttactgattctctgaaattttcccctcccctacccaccaggttactttcttgaaaagttaactcctgggactgtctgaaagattaaaaaactgcatctgcaaagaaggctgataaacaagtagacccaaagccagtattagcgttatggtcttttgattgtctgcaaaatatggacagtaggtcagaataacagccaaatcctcacctattttccgaaacattcttctgattatagcgtctgtgaaaatctcttagttcctccaagagcccagcagcaagcatgtcatccaccctcttatccaagcgctcatctagaacttgaatcaaattagcccatcaaccagcaagcaagttgtaggtacctactatatacttacatgacgagtgaacaggtggtcacaaaaaaagagaatttgtccaaacggaagaaagaattcagattccaaagattattataataattcatacgttactcacatttaagactttgcaactccaaataaaaatgaagcatagtcagaatgaagcacatgcctcctcattatatagagaaagcatacaattacagcaactgtgaaggacaaatattttattctcatatggaatgtgttttagaggtggctgaggatcccctggtttacctttcttatttttaatttaatatgtcattatactgcaacttagtgttactttatgtttaagaacccctagatgacaccttggataagaacatggaactttaatccaaagacatcctagatacggccgggcaaggtggctcacgcctgtaatcccagcactttgggaggccgaggtgggtggatcacgaggtcaagagttcgagaccagcctgaccaacacagtgaaatctgtctctaccaaaagtacaaaaattagctgggcgtagtggcgcgcgcctgtaatcccagctacttgggaggctggggcaggagaatcgcttgaacccgggaggcagaggttgcagtgagccgagatcgcaccactgcattccagcctgggcaacagggcgagactctgtctcaaacaaaaaaaaaagacatcctagatacattctaaactactgagccaagcaaaggagcaaagagtgagaggtcgtaattgttcagatgtgacaaacagctttactatgaatcagataccattattttatgctgcctgtagagtaaaagtttttgtttataaaatttcattattgaaaaattaccttttttatcaatttatggcagattaatttaacaacagattgtcaccattttaattatgttcttctacatctctatcattgtgatttattggcctacagcaacagtaaccttcctagaaagtttgcatttattgaggacccgtcatgtgtcaggcacattctgagcactatatatgtattaattcatctaatccttgatgaagctaggaaatatgtgttattactattatctctattttacaggagaattgggaaacagaaaggtaaactaatttgtcttaacaattcacataactagaagctagtggagcaggaatttgctattagacagtctgcctcaagagcctgtgctcttcagtgctacactctactgtttgtccacataatgatgtcatctttccaggcctatcataggctacctttgcaaactggtctctgactccccccaagataatattcgtcatcccttctctgtggccctacagcactctgaaaatatatctagcccagcatttatcacataaataatagacagacagatagtatctatctccttgtctgttgtcccactagactgggaattccttaaggaaaggcactgtctcttcaactctgaaaccgaagtaccacacagaatacccagcacttcattgaatgcttactgaatgtttgctggatgaataagttactactatcacggacataattatactttagcaacaaaataccatcaggctagcaagctaattataaggcatactgcttctagaacattctagcctccagccaaccttccacaagagactgccttctttttctcctttggaccttccctggatggcagtctctttcccattccgtccatcccatcccactctacctgtgatgtcttctcctaatgccagggctatcctttctccctttccaaacagatatctaggggaatggcactgtgcctaagccaacaaataatgataatgataataaaattaatagctaatacttgtttagtgtttattatgagccacccatggttctcagcattttctatacagtaacttattactccaagttccatcacagatggactctagggcatcaaagggctgttacctgcctggtcagcatgaagccaaaggatgcaagggttagagaacttcagaggacctccaaggggaccaccaccttcttccgtatgttgacgatggagaaattcactatgagagattcctgtttcttcaaaaacttgcaagctcctaagtaatttaaaaggggagggagggggcacacccataaaaaccaatagaaaatattcattctcaagtaaaacaaggagaaaggctgtttattacagaaagcctctttcttgaaagccagtcacgacagtgtgcacatctgtagtcccagctactcaggaggccaaactgggaggactgcttgagctcaggagttcaagaccaacctaagcagcaacagaccctgtctcttcaaaaagggggcatgcagaaaggcttattctcattttcactgcattaagttccaaaagacatgaaggtctagggttactccagtcctacagctactcagaaaagggtactaaagaaaactttaggtaaagtaagaaataatattatttttctaaagatatataaattattctgaaatcagttaaataggttcagaaacaacaggtttcttctacacaaacagaatggtactcactcactttcagataaacagtaaaagagcttgtttgggacactttgtaacaagccaacaagtctggtctggctggcgtgcctttcccacagtacaaaagcatgttgtacatccagctcatcagctttctttttaaatatgtcaaattaatgaagaatgctcctggctaatccagtgctctactggcacaaagatcactgagaaaagaactcacatacttattcttaagccaccatccacttctgtccgtatctattatgttatgcagcactaggtaatttaactcccaaatctacactctaccactctgggtgattgcaacttatcagcctgaaagtgatctttctcttcctgacccaattctacttcctgaaaccctaacgcaagagtgtagacccccttgtctttcagtatcactggtttctcaaagaagatctatgagaaaaaatgtagtaatagatatctcacttatctggagttaaaatacagcctcaagccaaaagaaagattaaaaaaaaagaaagtcctcattctctaaatgagactctagagctcttgcttagaacctattgactcttactaagaaaaaattctcaaactcattactcgtttagacgcagcaaaatgagaagtgataagaaagaactgattagtaaaaggagagaataaacaccaagctctagaatcatgtaataaaacaatataaaaatgaatgtttatcataatgttcctaggtttaaaaaaaattgaatgttttctattaaagtgtttaaaatgtttggatactgaaaagtataaacttcattaatctaaaacatgcattcttaatgaggttatacattgcctttaagggggtgaaaaaacttagatattacaatttgtgccccacccccctgccgtgcaaaggacaaccctacctgaagaaatccttttcttggctgagtactgtggctcatgactataatcccagcacttcggtaggctgaggcaggaggatcgcttgagcctaggagtttggaaccagcctgggcaacacagcaaaacatctctaaaaaaaattaaaaatttaaaaaactagccaggtatagtagtgcacacccgtagtcccagctactcaggaggccgaggcaggaggacatctgagcccaggaggtcaaggctgcagtgagccatgattgtgccactgtactccagcctgggcaacaaagtaagactctatctcttaaaaaaaaaaaaaaaaagtaataataataatgaatgttttaaatcctatattctaacattaagtttcactgaggggggtaaaattaggaggaaaaatatcaaattcatttgagtggaatacttcacaacccctatgaatatgagatgttactttaatatttaatctgtataaccatcaatagaacaggtccttcattagatgttctactatgctggaagtggtatcactcctaatactgcagaaaaataaacctaacatgaggctgcaattccaaaacaacctaaaaaaacatgaccttgtgagttcattcactacctctcttccctaccagatagtttccatgtgcaaaggtgagctgatctgtgagacagttaataaaatccacctcccactgggaaagctgctggggcagaacacggcattgcataatcagttatgaaacccaaatcacaatgtaaacaaactgcatgccagaaaaaatgtatatgaaaactgttatacaagcaaagatcaaatagaaaatgaagcaacattatataggccctaggggaaaacgatattgtactatgcatttaaaatgtaacaaagtaggctgcaattatttattgagggagttgaactgaagcaataactcagggcctcccaacctgctgagctagaacaacacatcaatctccactaactgctattaccaaatctctctcatcatctgggcaaactgaagaactgactgctctctagttgtaaaggaatttggggtcagcgcgccaggctttcttacctggccactttgcgtttgtcatgtggatgcagcttggcagccatttctgggtccacctggcttaggcgtttgtgaagtacaagaccatcctccttttcaagctccacttttcggtcaatcactttctcagtgcccatctcctggggctattaaatgatggtttagaagtatatttaattcaaccaacactgagacagtgtatgtgccaggcactttgctaactgtcaggaatacagaataatcagaagatcttgccatatagtgagagatcataaacagaaaattccaatatgctgtggtaagtgctatgaggccacagcaaacaaaaaagacagaagacttacagcatagggaaacacctggctatttgcttccctgtcagaagttcaaacaggtaccagggctaatatgtctattttagcatatccaggagtctagtcttctcagcaagggtgaacaaggagaccaggattgccagtgaattacagtttacacagtcttaccctacatagtagcacctacgtaaataaggtcagtgttggacatctccctaatatacatactgtgctgccagccaggaaatactgaatcaggctaatggctaacgtactgggttttttttaatataatttttctaaagaattatacatatttttttcttgaatcgcatctgtttttttttttgagacagggtctcgctctgttgcccaggctggagtacagtggcgcaatctcagctcactgcaacctccgcctcaagcctcaagtgatcctcccacctcagcctccctagtagctgggattacaggtgcgtgccaccatgcctggctaatttttgtatttttagtagagacggggtttagtagagatggggtttcaccatgttggccaggctggtctcgaactcctgacctcaggtgagccacccaccttggcctcccaaagtgctgggattacaggtgtgagccaccacgcctggcctaatgaactgttaatttatatggagatgctaattaatccacacagcaacatttttcccacacagagccccttcccatagaccagcctggaggaacacacttcacacatggaggtggcatttgcttgagaatattaagtaggaaaattatagttgctgggtataagaaataggcaagagtcaacctttctcccactgaaattagacagcaagaaagagcaatccatttcctcagtgagttacgagtgaactaaacttaccttggtattgacaagaactttccagagcagagattcaatgtaataattggttcctcccacaacaataggaattttgtctcgggcaaatatatcttcaatgtgaacattaagaaagatatcacgatatcaagagaatcctgactcactttggaaggacaccattagcaagaaaccacattcatttatctgcagagcagaggagaaagggtgggaaccaaaatgcgttgataccagccctcagtgtttccaacaaatttccagaatcatgtccaatcagttctggagggacttgcagaaaccagagacaaatgcatagtggtaattccttccagttctagaactttctaggtcttgctgctaaaagtcaaagttttattagtattccaaatcagttcaataagcacaagcccaaggactctcacagaaccaagtgtcagctgctcaggaggccatcaaggtgacatccattgcatgactttgccttctaaggcaaaacacaagctggtttctctaaggttcttagacttagtcagtctctaccatcatggagagactatcacattttgccacttgaggcttgaccaaattaagtgagatgcacaggttctgaagataaatagacttcaatttccaggttcagctcttggacaattactcagcctgtctgagtttcagttttctcacctgtaaaaatccccatgagccttaaatgtgacaattcatagaaatcccctatcacaatgcctaaaaaatagtaagcactcaatttactatagccactattgttttttcatctctgctactttaaatttttctctttagaatctccgttgaacagataattatctgctttaaggcggcctttgctcctgagaataatttttttttttgagacagggtctcactctgtcaccaagactggagtgtagtggcgcgaaaacagttcactgcagcctcaacctcccagggctcgagtcatcctcccacctcagctcccgccaccaagtagctgggactacaagcacatgccaccacatctggctaatttttgtattttttgtagaggtaaggtttcacgatgttacttgcccaggctgatcttgaactcctgagctcaagcaatccatccactgcagcatcccaaagtgctgaggttacaggcgatagccatcgtgcctggccgaaaataactttttttaaaagactttcaatatccaggtaaataatcatttacacatttctccttgccagccaatctgcaggcatagagacagaccacctcttttctactagaatcccactaacccttaagcggctaaggcagggtgggaagaaagatgttaccaatcaaggatcataaagaaaaaacactgtttgctttaaaaagagaaaacaaattctctatttccccctttaaattaagtatagggagcatacaatttccacagtaagataaaatgtcaattatacacaagttaaatatcccttatccaaaatacttgggaccaaggaaatgtttcagattttgaattatttgcattatacttactggttgagcatcccaaacctgaaaatctgaaaactgaaatgctccaatgagcatttcctttgagcatcatctcagcactccaaaagtttcagattttggagtattttggattttagattttcagatgttcaacctgtagtatgattaacaaagggaaagtgagcaaagaaatgaaaaggggaagggaaaaatgttaagattccagaagaggagagagtggaaagaggaaagaagatgggataggacatacttcacgggaaaaggtttaacttatttgtgcaagccatgaaatgactgtgatattgagcaaacacccttctactctttgggcctcagtatctagtaccttcacctgtcgaatcaagaaggctgattggggccaggcgtggtggctcacacttgtaattccagcactttgggaggccgaggcagtaggaccacttgagcccaggggttcaagaccagcttgtcaacatagcaaaatccatctctacaaaaaataaaatagccgggcatggtggctcatgcctgttatcccagcactttggaaggccgaggcaggtggatcacgaggtcaggagttcgagaccagcctggccaacatggtgaaaccccgtctctaccaaagatacaaaaaattagccaggtgtggtggcatgtgcctgtagtcccagctactcaggaggatgaggcaggggaatcacttaaacctgggaggcggagattgcagtgagccaagatcgcgctattgcactctagcctgggtgacagagcaagactccgtctcaaaaaataataataataaaatgaaaataatcagctgggtgtggtggtaagcacctgtagtcccagatatttaggacgctgaggtgggaggatcacctgagcccaggaggtcaaggtggcaatgagccatgacggtgccactgcactccaacctaggcaacagagtgagactgtctctaggagaaaaaaaaaaaaaaaaaaaaattcacgtacctccatttgaatctatatctgggttttctattctgtgccacaaatatatctagtactaaataagttccatgctattataattattatgacttttcaatcttttaatatatagcaatccagatactaaaggcagtctgcatgttaagacataagggcaatcccccttatattattctttttgcaaaaatttcttggttttacccagaactatattttccagtcctctcccatctaacaacccctttgaaattctaactataactccattatatttatagattaacttcgtatctccatttaaaggatagaaaaccgaagctcagtggggttaaggaaatgctttacccagtaaaattcacatggtaaaaaaggcagttctaggactgtaacacaaattttctgattcttaaattggtgttcttatcactaaaacagtgcttctcaaattttaatgtgtatataaatcactggggactcccgttataatgcagattctaattcagtaggtctggagtggggcccaagaatcagcatttctaacaagttcccagagaatgatgatgccacagtctaaggacaagaatttgggtgacaaagacactgtatctttcagtccatagtctgatggggatggcatccatcagtatttaggccttgggtgccccttctgagaagaaattgccactagaaagaaaacttctctcttggcttgggctgctttcacccaccaaacccagctgctgcctttcctaaggatatcagagcagttgctctatttctgaagtccaccactgtgtaattggtcacaagaggatccacaaagctgatcatgtggtgccggcagattctctgctcttgggcagaaaccttgttggtgatgatgtctaggccttcatagacctaggggaaagaaaattaacatgagaaagtcaaccacctccataaaagatgcatacttaatgaatagaaattttgatctatttctccctcctgccaaacacttcactgacccaaagcaccagggtagatgtattctaacaaacagcacagccagatccacgaaacccaaaacaaagaaagaagaaaatacagcattggttttcttatcaaatagtagctattagctcagatttaaaggtaagaaggatatgtaaatacatgcccagaattagtaaaaacgaattctgcatggccagaactttaaagcactgaaaattgggcaggttgttttacttatcacaagactccagaaaggtaacatttgcattcattgctcatagttctacttcaaaatgcttaggtatttcttggatttaaatagctctaaaaggttttcagaatttgtgtaagattggttccatttgtggagaaggagtctacaaaaatacatataaaacatacacatacacactttgaagtcagaacccctaatactgctgtactctagtggaaacattgtgatctatcaaaattactgcttcaggggtcagcaaggacaatctaaatactcaaaggcaatatcctgtctgtgagctcttgatctgccaattcgactaaaaagttcaagtgtactttttctaaatgcaaggtctccaagaacagatctgaaaataccagtttgaaaatagggatgaatactttgagattaaatgttctctgtaatcactgattctacagggagcactgaatgaacaaataataagttccgtagagcccacaaagatgttaaaagcatttttatctcacgtttccctttacttacacgggtgtcaaataagtacagtacagtgtaatggttaggaggaaagaccctggcgccaggctgcctcagctcatttcctagctctaccacttactagttattcgtagttgaagaagtcagttactaacctctctgggcctcaatctctcatcagtaaaatgaaaataataatatctacctcatagggttgttgtggggattaaatgagttactactaaaaagcacttagtttttgcctggcacattttaagggccacattgagggtcactattacctaattgctatcattatcactactactatcacaataactaaaggagaaagggaaataattttagtgttactgtttaatactcagaaggctctatgctcttagtgactgaggtcatttaccaagcaaggatataagctatcttcaatgaaataaaatcggtaaacagtaaaacagcatataaataaaaaataatgtaaataagagccataaggaaagcatcaactctgcctttttaactcatttaatttgtgcctgacagcagactcacattctcatacctgaaaattaatggaatcataaatcatagagtattcttttctgtgtatcttgaacaagacttccttctaatgttatacaaggtcatatggttattatacactggtgtcttctatgcacattaagaaaactaaaggggaggccggacgcagtggttcatgccggtaatcccagcactttgaaaggccaaggcaggcggatcacgatgtcaggagttcgagaccagcctgaccaacatgatgaaaccccatctctactaaaaatacacaaaaaattagctgggtgtcgtggcgtgtgcctataatcctagctatactcaggaggctgaggcaggagaatcgcttgaacccaggaggcagaggttgcagtgagccaagatcacgccattgcgttccagcctgggcaacagagtgagactcgactccgtctcaaaaaaaaaaaaaaaaaaaaaaaaaaaaaaaaaaaacgaaagaggccaggtgcggagactcacacctgtaatcctagcactttgggaggctgaggtgggtggatcacttgagctcatgagttcaagaccagcctgggagacatggctaaactgcggctctataaaaaatgaaaaattagccaggtgtggtgacacacacctgtagttccgctactggggaggctgaggtgggaggatccttgtgcctggaaggcggaggctgcagcgagccgagatcataccactgcactccagcctgggcaatagagccagactttgtctcaaaaaaaaaaaagaaagaaagaaagaaaagaaaactaaagggaggaaaagagttaataataactgtttattcctctctctctctctttttctcacagcccttggttggctctgctgtagcttagaattccaaatgatcccattttaaagagctcacatagcaacaacttgattttgctagtagaggatttctaaatcctgttaagtatgttacagtaaaaaggattctaaatttttacactgagattaatgttaatcagtgtcaaatgcatagctgcaaatgtacaattacccacacctccaacaaggacaaaatgtaaatatctctaccagcaccttctatcagaaaccctagaaggctagataaaatttcttcctgtaatctgcctttaggtgtatcttctagaggcccttaaaatggtgagcttaaacaaacggacacataaatataattcaaacagaaggtaacccagagctagctcaccttatttactaaaggaagtggcctatggtactgcttatgatagataatacaaatgccaccaaatatcaggaagaagaaaagagtattaatggtttaaagaaagcagagctcttactcatagttaacaaaaactgtaactcataaaagtactaaatcttggttactaatataaattgtcatctttgggtagtctgttaactctttgcctcttacacattcagattaaaagaaatgggtcataaagatgtgggtgatacagactagacatctgatttacatataatatggttttatgggtatgttttatagtcgttaactaaatctaaaactgaaaacttctgagcaccaaacacacaactcggaggaaacgctcactggagtattttggattttagattttcagatttgggatgctcaattggtaaatataatgcaaatattacaaaatcagaaaaaactaggaaaccaaaacacttctggtcccaagcattttgcataatggatactcaacctgtaccacagtacattaaagtacaataaatgaaagtatatgactgtgacctgcattgcaacaatagggaaaggagagacaaactctaagtgaaacaagattggccaagtgttcataattatcgactctaggtgatggatatatgggtagttcatttcattatttgcccttctttctttatatgttgggaaatttccatgacaaaaagtttattttaaaaaagccgcgtgcagtggctcacatctgtaattccagcactctgggaggccgaggcaggcagatcatgagatcaggagttcaagaccagcctgaccaacatggtgaaaccccgtctctattaaaaatacaaaaatcagccaggcgtggtggcgcacgcctgtaatctcagctactcaggggctgaggcaggagaatcgcttgaacccggacggcagaagttgcagtgagctgagatggtgccactgcactctagcctgggcgacggagcaagactctgtctcaaaaaagacatggatgtacttcacactcattataatggctattagaaaaagaaaaaagaaacagataatagcaaatgttggcaaggatgtagagaaactggaacccttgtgcattgatgaggggcatgtaagatgatgcagctattacggaaaacaatatggcagtttcgggaagggcaaggtggctcatgcctgtaatcccaacattttggaagactgaggcagacccaggagttcaaaatcaacctaggcaacataacgagacccgatctctagaacttaaaaacaacaacaacaacaaaaactggaagaaaaacaatatggcagttcctcaaaaaataaaacagaattaacatacaacttagcaattccacttcaggtacatacccaaaagaattgaaagcagggtgttaaacagatatttacacatccatgttcacagcagcattattcacaatagccaaaagatgaagtaattcaagtatccatccacagataaacagacaaacaaaatgtggtctacgcatacaaatgagtattattcagccttaagaaaggcaggaagttggccgggcggtgggtcgtgcctataatcccagcactttgggagactgaggtggatggatcacctgaggtcaggagttcgagaccagcctgaccaatatggtgaaaccctatctctactaaaaatataaaaattagccaggcgtggtagcaggcacctgtaatcccagctactcaggaggctgagacagaagaattgcttgaacctaggaggcagaggttgcagtgagctgagatcgcaccactgcgctccagcctgggcaagagagcaaggctctgtctcaaaaaaaaaaaaaaaagaaaaagaaaaaaagaaaggcatgaaattatcacacatcctacaacatggataaccttgaacatactatgctaagttaaataagccaatcacaaaaggacaaacactgtacgatctcatgtatatgaagtacctagagtagtcaaattcatagagacacaaagtagaatattagttacgaggagctggggagaggggaaaatagggatttattgtttaactggtacagagtttcattttaagaaaataaaaacctattgagatggaaggtagtaatggttgcagaacaatgctattgtacttaatgccactgaaatactgaaatggctaaaatggccaccgaaatggttaatggtcaatgttatatcacaatttaaaaaaaaaaaaaaaaagacttggatgatagcttttaggcacaataagaaactagtgaatagcagcaatgaaataaaattttcaaaattattaagagctggtaatgttctatttcttgtgatattccgtttcttgaattgaaattcagttgagttgtggttacacagatattttaactttttattattgtattgagctgtacagttattaattatgtgtttttatgggtatcctttatttatcaaataaaatcatactgcacagttaagaagcaaaaacacaacatttttcacatttgtaccaggcataaatatctaaacaaacttagaaattaatcaattttgtaagtatcacatttggtccagaggtttaggtcacatccatgctctaaatgccacaatcaggcttattattttattaccagcctagaaaacattcacatgtgagatttgtagctgaatctcttacacttaccctatttttcagcttcaattacagtttcagcatcactctacctacaatcagcctgaatgctgggaagagccaaaaggatctgtgttatctttcaaagacagcatgccactctgctccatttccccttctcccaaaggatacttgtgatctgtgtgcatggaaatgatttggaatgaaatgcttttctctgcacaaaccatattttgacaactaagggacaactggcttctttgtaaggcctgatgactgaaatattctgaaaaattccaggtttaatccacttcatcaattatctaacataattgacttatctctacaaacatttactaagcgtctactatgtgttaggtatactgcaacatgttagttatgaaaagaagattaagaaagtcccatggacgggcatggtggctcacacctataatcccagcacgttagaaggctgagtaggaggatcacttgagaccaggagttcaagaccagcccggccaatatagtgagactccatctctaccaaaaatttaaaaattagttgggtgtggtggcacgtgcctcccggctacttgggaggctgaggcaggaggactgcttaggcccaggagtccaaggctatagtgagctaaaaaggtgcccctgcactccagcctgggcaacagagcaagaccctgtctcttaaaaaaaaagagtcctagtcctcagagtccaagttagacacaaatagctgtaattaaagaagatacatgatacaagagtgtataaccactaaacatttaatgttctaggcattaaattgggcattatagaaaaatataccactttgttgcacctctattgatggtttatttccacactgaaaaaaaaaatttgtaaaaatggtacaacgctgaaataacctgaactctccaaatcaacagagctgaaatgcctggaggaactaatgaaggtaaaagaaatctacaacagagaaaaaaaaaaagagatatgaaaaaaaaactataaacaacaacaacaacaaaagatatggaaaaaacaaaaaacaaaaaaagaaatccataacagagaactagaagaagaaaaccagcagaatccagacccatggttctcaattcaagtgattttgttcactgggagacatctggcaatgtccaggctggggtgcagtggtgtgatctcagctcacggcaacctccacctcccaggttcaagcaattctcctgcctcagcctcccaagtagctgggattataggtacctgccaccacgcctggctagtgcttgtagtagagacggggttttgctatgttggccaggctggtctcgaactcctgacctcaggtgatctgccagcctcggtctcccagagtgctgggattacaggtatgagccactgcacccagccagaaacatttttgattgtcacaactgcagggctgggggtgctactagcatttagagggtagaggccaaggatgctgctacacatccaatgatgcactctggtctagccttcagccccaaacacaaagaattatccatccccaggccaggcgcggtggctcatacctgtaatcccagcactttgggaggctgaggcaggtggatcacgaggtcaggagatcgagaccatcctggctaacacagtgaaaccccatctctactaaaaatacaaaacattagccgggcgtggtggcaggcgcctgtagtcctagctactcgggaggctgaggcaggagaatggtgtgaacccgggaggcggagcttgcagtgagccaagattgcgccactgcactgacagagcgagactctgtctcaaaaaaaaaaaaaaaaaaaaattatccggccccaaaatgtcaacagtcctgaaattgagaaaccccgatctaaagaaatttcaccttgcagatactccccccagttttttacgtgtacagccaaagatcccatccttttaaggctccatccttttgggctgccttgctgtagggtggccctgagtgtgctaatcagcagcagtgtccgtggcagtgggcagatcccagagctctgagtgctggctgtgatgtcccaacatagctgtctacaagcaaaaggaaaagctgccccctggtttggttccttccctgcaagttatcttccaccttttcacttatgtccttcccatttcaaattagatcctaaagtccttcaatcactttcttgcctcaatggattacacctgccttgaaaaccacaaccttggattatggctcaatataatcactgcttgctgccctccactgccctatggatatcttactgagatcattaatgaacactgactgccaaatataacacttttctactaagctctcaaagcaagtaatggaaaaagcaacaatctgatactattgagctctctccccttcataatcactcccctttggggcttcaagggcaccattctttccaggtttttcttcctatcccactaggccttcctccatctactttactgaggccagccactgatctattagcagtatctgtcaggaaacaatattgagaaatggcagtctttatggcatccatctgcctttttgtattatgaactttctctgggtgacacccatggcttctacaaccactgttgtgctgataactcccaaaatccatatccacaatctagttctctttttgtggtgccagacctgtatattcaactgtctagtggacattccatcattgagaggcacatagcatatagaaaagtggttaacagtaaggattctcatcaggcatggtggctcacgcctgtaatcccagcaccgtgggtggctgaggcaggcagatcactggagcccaaagtttgagaccagctgggcaacattgtgagactctgtctctacaaaaaaaaaaaaaaaaaaagaaaagaaaattagtcaggcatggtggtgtgcacctgtagtcccaactactcaggaggctaagatgggagggtcatttgagcccaagagggtgagctgcagtgggccataattgcaccactacactccagcctgggcagcacaacgagacaagaaagaaaggaaagaagagagtgataaaggaaagaagagagtgataaaggaaagaaaagaaaaagaaaggaaggaagggagggaaggaatgaaaggaaaaagaaagaaaagaagaaaaggaaagaaagaaggaaaaggaaaagaaagaaagggaggaaagaaagggaaggaaaagaaaagaaagaaaagaaaagaaaagaaaaagaaaagaaagggaagagggagagagggagggagggaaggaaagaagaaaggaaggaaggaaggaaggaaggaaggaaggaggaaggtcaagtttttcttctggaacctcaagtttctcacatctaacatctcttctagttcttttttttagacagagtctctgtctcccaggctagagtgcagtggcatgattttggctcactgcaacctccccctcccaggttcaagcgattctcctatctgagcctcccaagtagctgggattataggcacctgtcaccacgcccagctaatttcttctagttttaatagtccaagcttcgggagaaaagatagttttagcataggtagatgaaaggaaaaattattttcttaaagatgttgacactcactgggaagttgattttcctttagacaaattcaactgaagagatgttgaagagtacgggaaaggctgatttcttgactcactttacttttttaattaaaagaaaactttttttaaacataacttcagtaggttaggactaataagtttgctgcaggaacatcaaggcaattactcttttcaactctggcagaaattcaactgtagatatgctgaataaactggacacattaagatgctcagaaagcaggagaaggccaggcacagtggctcacacctgtaatcccaacaccttgggaggccaagataggaggatcgcttgagctcaggagtttgaaaccagcctaggcaacacaaagaccccatgtctacaaaaaaaacaaaacaaaaacaaaaaaacagttttaatcagccaggcatggtggcacgtgcctatagttctagctgctcaggagactgaggtgggaggactgcttgagccaggaggtcagggctgctgtgagccatgattgcaccactgcactccagcctgaagtgagacactgtctcaaaaaataaaataaaaaagcaggagaatctgtgcctgatctgttgagtcagtgtgatgagactcatggtttggaatttatagtgcagattatggcttttattctttcctacggctcttctctttaagggaaaagggaccagaatcatataaggccatagttttcttcttttgtttttttgagatggagtttcgctcttgttgcccttgctgaagtgcagtggcacaatctcggctcaccgcaacctccacctcctgggttcaagtgattctcctgcctcagcctcccgagtggctgggattataggcatccaccaccatgcctggctaattttgtatttttagtagagacggggtttctccatgttggtcaggctagtctcgaactcccaacctcaggtgatccgcccgccttggcttcccaaagtgctgggattacaggggtgagccactgcgcctggccaaggccatagttttcaaactgagatgtgtataacatacatgtgatacattcttctgaagtatcaatcttactaggtagcagaaaaaaaaaattgaaacatttttacatctaaacaaacattagggcagagaatgcaaaattggcacatatttttaagttaaaacatgagaaactgcgacacagagcttctgcagtggctgcttggagtccacctgcaaacaaacactggagaagctctgcatccagtccaaacacccaacattttatattcgagaatactcaggctcccctggccatataactggctggaagcagagacaggactaatgccaggctgctctgcctataacccaagctatttctgctgccactcactagaatttttatccccatttgactctggtatatttgtttgcttcaagtaatgaattcctactgaggtgaaattaaattccagaaactgaggaaaagacagctaccacacactgaaccccttcaagattctttttttttttttcgagatggagtctcgctctgtcgcccaggctggagtgcagtgactccatctcggctcactgcaagctccgcctcccgggttcatgccattctcctgcctcagcctcccaagtagctgggactacagaagcccgccaccatgcctggctatttttttttgtatttttagtagagacggggtttcaccgtgttagccaggatggtctcgatctcctgacctcgtgatccataaaagaaaaaaaaagataaattaaattaggcattataaaaatgtagaacttttgctctgtgaaagatactgtgaagagaatgaaaaaataagccacagattgggagaaaatatttgcgaataacatatctgataaaggatttatacccaggatatatataaagaactcttggccaggcacagtggctcacgcctgtaatccctgtactttgggaggctgaggcaggtgaatcatctgagggcaggacttcgagaccagcctgcctaacatggtgaaacctcatctctactaaaaatacaaaaaattagccaggcgtgctggcaagcacctataatcccagctactcaggaggctgaggcaggagaatcacttgaacccgggaggtggaggttgcagtgagccaagatcgcgccattgcactccagcctgggcgacaaaagcaaaacttcctctcaaaaaaaaaaaaaaaaaactcttaaaattcatcaataagaaaacaaccccactcccgtgggcaaaagatctgagagacacttcaccaaggatatacagatggcaaataaggatatgaaaagaagctcaacactggctgggcgtggtggctcacgcctgtaatcccagcactttgggaggccgaggcgggtggatcacctgaggtcaggagttctagaccatcctggccaacgtggtgaaaccccgtctccactaaaaatataaaaattagctgggcgtggtggcaggcatgtgtaatcccagctagtcgggaggctgaggcaggagaatcgcttgaaccgatgaggcagaggttgcagtgagccgagatcgtgccactgcacttcagcctgggcaacaagagcaaaactctgtctgaaaaaaagctctccctctccctctccccctccccctccctctccccatggtctccctctccctctctctccagggtctccctctgatgcagactggaggctggactgtagtgccgccatctcggctcactgcaacctccctgcctgattctcctgcttcagcctgccgagtgcctgggattgcaggcgcacgccgccacgcctgactggttttcatatttttttggtggagacagggtttcgccgtgttggccgggctggtctccagctcctaaccgcgagtgatctgctagcctcggcctcccgaggtgccgggattgcagacggagtcttgctcactcagtgctcaatgttgcacaggctggagtgcagtgttgtgatcttggctcgctacaacctccacctcccagccgcctgccttggcctcccaaagtgccgagattgcagcctctgcccggccgccaccccgtctgggaagcgaggagtgtctctgcctggccacccatcgtctgggatgtgaggagcccctctgcccggccgcccagtctgggaagtgaggagcgcctcttcccggccgccatcccatctaggaagtgaggagcgtctctgccccgccgcccaccgtctgagatgtgaggagcgcctctgcccagccacgaccccatctgggaactgaggagtgtctctgcccgaccgccaccccatctgggaggtgaggagcgtctctgcccggccgccccgtctgagaagtgaggagcccctccgcccggcagccgccccgtctgggaagtgaggagcgtctctgccaggcagctgccccctccaggaggtgggggacagcctctgcccggccagccgccccgtccgggaggcggggggcgcctctgcctggctgccccgtctgggaggtggggggcccctctctccggccgccaccccgtctgggaggtgtacccagcagctcattgagaacgggccatgatgacgatggcggttttgtcaagtggaaggggggaaagtgtggggaaaggaaagagaaatcagattgttgctgtgtctgtgtagaaagaagtagacatgggagactccattttgttctgtactaagaaaaattcttctgccttgggatgctgttaatctatggccttacccccaaccccgtgctctctgaaacatgtgctgtgtccactcagggttaaatggattaagggcggtgcaagatgtgctttgttaaacagatgcttgaaggcagcatgctcgtaaagagtcatcaccactccctaatctcaagtacccagggacacaaacactgcggaaggccgcagggtcctctgcctaggaaaaccagagacccttgttcacatgtttatctgctgaccttccctccactattgtcctatgaccctgccaaatccccctctgcgagcaacacccaagaatgatcaataaatactaaaaaaaaaaaaaaaaaaaaaagaagctcaacatcattggtctttagggaaatgtaaattaacgacaatgagataccagtacatagaactgcggaaattaaaagaaaaaaaaaaaagcctgacaataccaaatgctggaaataatatagagatacagaagaacacgaattctcattcactactgggagaaatacaaaatggtacagtcattttagaaaacagtttggtagtctcctgtaaagttaaaccataaagttaccaaacagcctagcaatcccactcttaggtatttactcaaatgaaatttcacactaaaacctgtacatgaatgtttacaatagctttctttataatcaccaaaaaccagaaacccagatgtcctttaataggtgaatagacaccaggcgcggtagctcacgcctgtaatcccagcactttaggaggctgaggagggcggatcacctgagatcaggagttcaagaccagcctgaccaatatggagaaactatgtctctactaaaaatacaaaattagctgggcgtggtcgcacatgcctgtaatctcagctattcgggaggctgaggcaggagaatcatttgaacccgggaggcggaggttgcagtaagccaagattgcaccactgcaccccagcctgggcaacaagggagaaactccgtctcataaaaaaaaaaggtgactagacaaactatggtacatccaaacagtggaatactactcagcaataaagagcattggacgcatgcaacaacatggaagaattttaaacgtattttgctggccaggtgcagtggctcacgcctataatcggagcctgaggcaggtggattgcttgagctcaggagttccagaccagcctgggcaacgtggtgaaaccgtctctacaaaaaatacaaaaatgagccaggtgtggtggcacaggcctatagtcccagctacttggggtgctgaggtaggaggattgcttgagcccaggaagttgaggctgcagtgagccgagatggcgccactgcaccccaccctgggcaacagaatgagaccctgtctccaatcaatcaatcaatctaccttttaaaaaaatgtattttgctaagtgaaaaaagccaaacctcaaaggctacatattgtatgattacattttaagacattctggaaaaggcaaaacaatagggatggaaaacaggtaagttgttgccagagattgaaggagatagaggggttgactacaaaggggccactataagggattttttagggtgatagaactgttcagtatggtactgtggggtatatatctgactctatgcatctgtcaaaacccatagaactaaacatcataaagagtacactttactatatgtatgcaaaaaatttttaaaaatgtttttttgggacagagtcttgctttgttgtccaggctagagtgcagtggcaccatcatgactcactgcagccttgacctccctggctcaagccatcctcctgcttgagccaggagaaattgggactacaggtatgtgctaccaggcctgactaatttttttttttttttttttttttgtagagatgggctctcactatgttacccaagctgatctcaaacttctaggctcaagcaatcttccctccttggcatcccaaagtgcttggattagaggtgtgaaccactgcagctggccactgtatgcaaattttttaaaataaccagaatatctgggaacccaggatagactacagactgtaacaaatgaaatctaactgcattacaaacgtctgatataacctcagagaggaaaacaaaaggagctgatctaagtaacttcataaaacaatgttactactcgatactgtaaggataaaaacaaacaaacaaactgtaggcaaacattgtactctagttggtaaatctgtttctcacaggagtaatcactgaaactacaggttacacaaataagtaaatatactatagggaatgagagctaaatttcttactctgagaaagaagtcacaaataagcaaggggggaagactagaatgaatcttgtggtgctggattagtcagagataccagtataaacccatgcttattttaatatacatacagatagagaaataaatataaatgtgtgtatatatagattaatatacatacatacatttcctagctctttccactgaaagggactagaagcatcttgtaataccagacaggaagtactaaacacacacacacacacacacacacacacagagagagagagaaagagagagaaaggaaggaagggagggagggagggagggaagaagggaagaagtgagggaggggaaggaaaaggaaggaaaaggaagaaaggaagaaaacaaaaagaaagaaagaaaagaaagactctgatgaatgctaaaatcagagggtgaaactttaaggagaaataggacatctgcatagcctgagggtatctcccctaaaatatttattaattactgtggtgcttttaacatatgtccgcaaattatttgataagctttcatcctggaaatgaagcttaattctccttctattcagtgtgggccagacttggcaaatgatttccaacaaataagactaggtactgtcattttatggaaatggaaaagaaaaataacacaaaaagagaaaaatcgtgactttttcagtggagaaacgtgtatacaatctcaaccaaatgatcaaagttaccatcaccagtaataagccatgctaatactatgttgatatcatactttgatatgatccaatgagaagggtacttcacttctgtggtatactttcccaaaatccataatgccaagtctaatcatgagaaaccaaaacccaaatggagagacatctacaaaagagctgaccagtacccttcaaaagtatcaaggtcgtaaaagacaaggaaagactgaaaactgtcaaagattggaggacactaaagatacatgatgactaactgcagtatagtatcctaaattgaatcctgaaatggaaaagggacataagtgaaaaaactggtgaaatccaagactataatttagttaatagtattgtacctatatcaatttcttagttttaataaatgtaccatgatgatgtaagatattaatattaggacaaggtagatgaagggtatacaggaactcttggtactatctttgaaactcttgtgtaaatctacaactatttcgggccaggcacagtgtctcacacctgtaatcccagcactttgggaggcagagacggatggatcacctgaggtcgggagttcgagaccagcctgacccacatggagaaaccccatctctactaaaaatacaaaattagctggttatggtggcgtatgcctgtagtcccaggaggctggggcaggagaattgcttgaacccgggggatggaggctgcagtgagccgagatcacaccattgcactccagcctgggcaacaagagcgaaactctgtctcaaaaaaataaaaataaaaataaaaatctacaactatttcaaaatcaaaattaaacctgtaatctcagctacttggaaggtgaagtgggacgactgcttgagcccaggagtttgaaaccagcctgggtaacacagtaagaccgtgtctcaatcaatcaatcaataaaaaattataaaaacaataatataggacagtttcttaactttagtacaattaatatttggggccaaataattctgttatgggaagttgtcctgtgcctactagaatgttagcaatgtctctggcctctacccattagatgccaggaacccacctccccagttattagaaccaaaaatgtctccagggattgccaaacgtcccctaggaggccaaatcaccccaagttgagactactgatatagctatatacattaacatataaagatatccataacatagtgttaaaagaaaatagaatagtatctaacctctgagtcaatttatgtaataacatatacacacatgacacatgtgcttaaatatatatacaaatgtctggaaggatgtgaaccaaaatcattactccaggatgctaagactatggttaaattgtctctgtacttttcagtattattggatttttttaataagcatgtctcatttttcttttctttttttttttgagatggagtttcgctcttgttgcccaggctggagtgcaatggcgtgatctcggctcactgcaacctccgcctcctgggttcaagtgattctcctgccttagtctcctgagtagctgagattacaggcatgcaccaccatgcttgactaatttttttgtatttttagtggagatagggtttctccatgttggtcaggctggtctcgagctcctgacctcaggtgatctgcccgcctcagcctcccaaagtgctggaattataggcgtgagccactgtgcccggcccccgcatgtctcatttttctgaacacaaaaatgctttgttctcatttttttcatagtgcttccaattcaataaccaaaatcctgttggttctgtttacaaaatatcaaaatggttacctattctctccagccaaagcccaactccagcctctctcacccagactaatgtaacagaatcctaaactgtttttccttctctaacccactctccacccagttacttcataaaatagatttacaggccaggtgcagtggctcacgcctgtaattccaaccctttgggagcccgaggtgggcagatcacgaggtcaggagttcgagaccagcctgaccaacatggtgaaaccctgtctctaccaaaaatacaaaaattagccaggcgtggtggcatgcgtctgtaatcccagctactcaggaggctaaggcaggagacttgcttgaacccgggaggtggaggttgcagtgagctgagattgcgccactgcactccagcctgggtgacagagcgagactctgtcttgaaaaaaaaaaatagacttactaccacttccctctttaaaacctcaaacctcatggcatgacttttgagggcctcaaaaatttgttcccagggtctatatttttagttttacctcctaccactgtccctcaagtaccctctatgccagatagttgctggtcattccttgaaaacataccatgcattttcttaactttgcccatactgttcttttgtcagtaatattattcttcccacttttctgcttgataaaatgtacacagtggtacagaggaaaagaatgggatggaggatgaatgaataaataaataagagttagaggaaaaagtataaaacagcatggagatgaggatttaataaagtaatttttggtagggaggagacaataacagcacccacggcaaaaggctacggtaaggatattagataatatttgtcaaacttttagaactgcctgacatatatattattcttgctattatcttcagtagtataattattatgatcattcctgtaatgagggcttgaactctgactgccacaatgagggaggtacagggaggctgctactcacaagcagagccccaaagggatcaagaggccaacagggtcctggtctgattcaagtttctgaggaatccaaaactacacagaaaaacaaaaccaattccattaaatcataatggagcacatatgtgaattcctatataccccaagtaacttttactcctcaaatatatctttttgaagtggagctgcttcaacaccctgcctcaggcactgaaacatcagggtagcactcatcctcatgaatctgaatctgcaagcctcatctgtgctctcctatggtttcctgtttggccagtagtcacttctccttccttatataacacagatttgactccaaagttctccctgtaggtgcaaaaacatgaccacatatgtacaacatacacagcttaatactgcagccaaaagaaaactaaattcacttacaatggaggtgaaccaagggacctagaaactcattatttatatgtgtatctatctatctatctatctatctatctatatatatatatgaatgatgagtcgaaaattttgagatttcctttttagcctcttgtaagtctcagtccttctaaaagactgcctttggctgggtgcagtggctcacgcttgtaatcacagcactttgagaggccgaggctggcggatcacctgaggtcaggagattgagaccatcctggctaacacggtgaaaccctgtctctactaaaaatacaaaaaattagccaggcgtggtggcgggcgcctgtagtcccagctactcaggaggctgaggcaggagaatggctagaacttgggaggcttaggttgcagtgggccgagatggagtcactgcactccagcctgggtgacacagcaagactccatctcaaaaaaaaaaaacaaaaaaaaaaggactgcctttgtcagttgtggcaaataccttccagatagaccccttttctcctggttaatgggtcttcaaaaaaaaaaaaaaaaaaaaaaaaacaggtcttcaagccttttatttcacattttattaagccactgtgatccaccatcccatctctcctttcatatccctcccccaagcatcccatatctcccttgatcagacagtcttttggtacaaacactgctcctacagtatgtcccaaagcaaacaaaaagaatacagaggccaggtggggtagctcatgcctgtaatcctagcactttgggaggccaatgcaggaggatcacttggggccaagagtgttcaagatcagcctgggcaacatggtgcttctattaaaaaaaaaaaaaaaaaaaaaagaacaaagagctccacatctattggatgacgagatgacacatattctgcttgcttactagtcagactgccaaaaatcatttgtttctcctcttgtaggtttaaacaaacacaaaaggaactgtgctcctatgtacggctactgcttctccacaggacttgaaaaactgaggcattagagacacttcctctctataaacccgaacagaacactttgtttcttttctcttagcatatagttggtagtttgtatttccaggccatcattgtacatgtttggcaagggccttcaattttctcagtacaatgtttcatccagtcactgaaggcccggcactgtaccttgaatttacaagccaagaaaaagactcagactgaaaagaagaccttcggtatcatcttcctgaaatacatcagactctacaaatgagttagaagacccagatccaattcccagtgtcttgcagtgtgatctctagacagctctttaatcttctgtagctccagtttttccatcctggaaaacagggattgtattacctgtccctccttgaattcagactcttactactgaatgagaatatttttatttctataatttgtgaaacaaccagcattcagaagactcagaaaataaagcacaaatgttgtttctcacttctgtcagaatggccatgtagaaatcctcagcaaaacccaagagaaatcccaaagaaggtaatcccctcagaaagtagttctgacttcccaatccacaactaccttgcataagaatcatggaagggcatgtgttttcaggacctcctggggctgtgtcatagaaaaaaaaagaaaaagaaaaaagaacactgggaagaaagaggacaggcagtaccttcagatgctagatggctacagaagcaagtcactgcatatcaggctacatgaagaaatgatcaccatagacacaatacctttaacaaccccattgtagttttacctcaaagcttaaagtacttattcaatgtttacaaaaacaaatactttctctggataggaactgccctgtaggtgctgtagggttgaccttgggtaggtgttgccttggatgaccctacattttaaagcaggacaaagggatgacaaaagcagtatgaagtacgagacaatttaacatttaagatagtgttgtacaatagtttctgagttactggtacacttctgaatagaaaattttcagcagcacaccaaaaggaattattaaaatgcaaatattggttttaaaaaacccaatttagaaacttgaaaaaactttctatgatcacactttctatttggtcaccctttggtgtgttacaacaaagaagtttactgttctgtctaggctctccacaagtccaagtttaccctttgttccaataaacactatctgtctttgatacgaacttgacattagattctattaatatctcttagctgcagcaaattttatccccaaagtacatcaggtggcttccagtcagctcaacactccacttgacagatatcactatgaattaacactgtgatttacaatatgaatcctaaaatacatctttttcctgatcaaaatgttgcacactcctaagaaggataactggcatacaagttaaaaactcctggcctggcgcagtggctcatgcctgtaatctcagcattttgggaggccgaggctggcggatcccgaggtcaagagatcgagaccatcctagctaacacagtgaaaccccgtctctattaaaaatacaaaaaattagccaggcgtggtggcacacgcttatagtcccagctactcgggaggctgaggcaggagaatcgcttgaacatgggaggcagaggttgcagtgagccaagatcatgagcctgggtgacagagcgagactccatcttaaaacaaacaaacaaacaaacaaacaaaaaactccctactgattgaaccccacagcccctggtcatcttaaaggaaatggctttgtgtagcagatatgccactggggatggaaagcagacactttcatgttcagactccaggtctgctacttattctaagaccttaggcctattttcttaactgtgaagtgataatatccattttatgagactattgtgaggattttaaatatatatatatatatatttatcaccagcacagtgttccatgcctatagtcccagctacttgagacaggaggactgcttgaactcaggagttcaaagttacagcagtgccaggcgcagtgtctcacacctgtaattccagcattttgggaggccaaggcaggcggatcacctgaggtcaggaattccagaccagcctggccaacatggtgaaaccccgactctactaataatacaaaattagccaggtgcagtggtacatgcctgtagtcccagctactagggaggctgaggcaggagaatcacttaacctgggaagtggaggttgcagtgagccaagatggtgtcattgcactccagcctgggccacaatagcgaaactccatctcaaaaaaaaaaaaaaaaaaaaaaggtcaggcatggtggctcacacctgtaatcccagcattttgggaggttgaggtgggcggatcacgaggtcaagagatcaagaccatcgtggccaacatggtgaaaccctgtctctactaaaaatacaaaaattagctgggcctggtggcatgtgcctgtagtcctagctgctcgggaggctgaggcaggacaatcactggaatcctggaggcggaggttgcagtgagctgagacagtgccactgtactccagcctagtgacagagcaatactccgtctcaaaacaacaacaacaacaacaaaaacaaagttatagcagtgagctatgatcacaccactgcattccagccggggcaacagagcaagacctcaaataaaaaaaaaaaaaaaaaaaaaaaaagaagaaactgtaaacatttggtaaacaatgctttgaaaatttgagttgttgatatttattattgctttgcctgtggagttacttgaaattgaaaatgttatttcaagtagctggtgattcaacatcaacaatatcattttgtttacatgtttaccaaatactagtgagtcaacctcaagtcactgaaaagcagcatctcctttcactggttgaaaacacaagttgggccaggcgcagtggctcatgcctggaatcccagcactttgggaggccaaggcgggcggatcatgaggtcaagagtttgagactagcctggccaacatgatgaaaccctatctctactaagaatacaaaaattagccgagcatggtggcgggcgtctgtaattccagctactcgggaggctgaggcaggagaattgcttgaacctgggaggcagagggggcagtgagcagagattgcgccactgcactccagcctgggcgacagagcaagactccgtttcaaaaaaaaaaagaaaagaaaaaagatagaaacatttctttggtacacagctatgagtaacgagacataatagctactatagagctatatccaaccctcactgccagaacccagtaacctacttaaaaacagatgtaaggctgggtgcagtgcctcacacctgtaatcctagcactttgggaggctggagcgggtggatcacctgaggtcaggagttcgagaccagtctggccaacatggcgaaactccgtctctactaaaaatacaaaacttagctgggtgtgggacaggtgcctgtccctcaccctaatcccagctacttgggaggctgaggcaggagaatccttgaacccaggaggcagaggttgcagtgagccaagatcgcgccactgcactccagcctgggcaacaagagcgaaactctgtctccaaaaaaaaaaaaaaaaaagaagaaagaaatgatagaacataaatattggcatggaccttaggtgtcatcagtgtaactccatcttactgaaactcttattacttaagtctctgaggtatcagaccacagatctactattataccattcttggatattttttatccaagtaccatacgtactgctcacaaatgaatgttccttacacactgccttcatcatgttgctcatctcacattccatatctgcaattgaacagtctccttttactatcctacctacacactatggccatttcaccttctaaatcttcatcttcattcatgttccttttttttttttaagactagtcatgtacagtagtgagaaagggccaaagagtagaaaagggagttccatctgtaactgactgtgaacaatcaactgagacaactcaatacctttggaccagcttcatgttctttcctttaataagctttttcttctttcttacctatccaaacttgacctatttttcaagccctttttcagagagctttccatactaagccagccttcgataatttctcctgtctcagaaattctataatacttgtcataaaatctagcatctgtagtctctctcctcccatcatcttgcaaatccattaatatctctgtccaaacatttattagctctgccttgttttatgttcagctggactaaaactcaagggcagaaattatgattttgtctctccagtagggcctcgcagaagatagcagctgctgtatttttagctcttattatgtgccatatattgtattaagtactgcacatactttatctcatttaatcatcacaataatgttgtgttattgatattattcttcctactttacagaagaagaaacaaaggcatgaagaggttaggctatagctgcatatcttggaaaagacagctgggatttgaggtaaattgtcttctgaagctggcacaaagtagactgcaaacaaattattttttgaattatccgatcgtttcatgtgtgctgatggtcttgtcatgccacataaactaatgaaagcagaaactatgcccactggcttctgggtgagttggggaaaggaactgcccttctttgctgagtactcatcaggtgctatgttcagtgccaggcatttcatgttcaacatctcatttactctgtgaagactcataactgtaaattctcctcaacaaatagctgctgtagttcctccatcagagatttacccaaaatgtcacccactacccactcttaatggagcaaaatgctcccagatgtgatgtacaccccttctgggcctcccagttcgaagaagaggacaaagccccttcaactttaaatcagccattatgatttaaaacctctacttaaaaaagcatttaccacaagtctggccttattccggacagggcactctgttcttcgttctaacgctcatgatcccatttattaagcactataaccttgtgcggtaggtgacattttcctcacttcacagatatataaaataacgtccaaataaacgacattgttgatccgaagtcacatggccaatggcagattcaggactagaatccaggtctcctgactgtcaaccctattccactcccccagcagacaccataggtggtatccaatttatcctgatctcgctgggttagggttagagttacaacaaaagctctggaataatttttattcaaaagatatttactggatacctatctgtcgaccttgtaggttcaaataccatgtcttccacttattcgctatgtgacatggaaaaaatcgtttcacctccctaagccccaattcctttctccataaaaggagataatagtatctaccaaatagtaacgtcgtgagaagttgatgagacgatgataagggaaacatctggcactgtgtctggcatgcggcgggtgcttagtaagtatgggctccctttacctaccccctccgcccctacaagcctcggggttcaccctttaagacctttgccacagggtgtccacgcggcctccggggtccccaggcgcccgggccagccgcactgccatacctgcatggagtcagcgctgacgatctcaccgccgagccgctggcctagctgcaacgccagcgtggatttgccggtgcccgtggccccgagaatcactacaagaggtagggtccgttgcaggcccctgagcccactgcccacgggaactgctcgtgcagccgccacggacgccatcttatggcagtctgcgcttgcgccggagcagctgtccccatggcaaccgtctatgcgcctgcgcggatctcaggctttgtagcgaggttgcttagggaggagggagcggcaggacccaggcgacgtgactgcagtcaactaactggtgtcagaacctcaactacccgccgtctttttttttttttcttcttatttggagacggggtctccctctgtcgcccgggctggagtgcagtggcgcgatcttggctcactgcaacctccgccttctgggttcaagagattctcctgcctcagcctcccgagtagctgggactacaggcgcccaccaccatgcccggctaattttttgtattttagtagacacgaggtttcaccatgttgcccagggtggtctcgaactcctgagctcaggcagtccacccgcctcggcctcccaaagtgctgggattacaggcatgcgccactgcgccagaccacctgccgtcttaaatggtagatggcaaccctatctaaatagatccgtccctattattctttcacagcactcaagttatttttctttacagtacttattacaatataaaattataaataggtctcttgtttttttgtctgacttattgggacaaattctgcctagatcattgctgtatctccagtgtctagcacagtacctggtacccaagagacacccaatacttgttcaatgaagaggagaatgacctgccggtctagtgcccggggcagtaagctcagaggtgtggcattctccagaatgaggtctgcccagttctcaggccagggcagctgctctaatattttcatcccatagtacgacctcatactcaatcacaaagcaaacctttggcccggcacagtggctcacgcttgtaatcccagcatattgggaggccaaggctggtggatcacctgaggttaggtgttcaagaccagcctgactaacatggtaaaaccccgtctctactaaaaatacaaaaattagccgggcgtggtggcgcattcctttaatcccagctacttgggaggctgaggcatgggaaccggggaaacggaggttgcagtgagccgagatcgcgccattgcactccaaacctgggcaacaagagcggaactccgtcccaaacaaaacaaaacaaaacaaaaaaacagaaggcaaaccttttcatctccttggccaaagaatgcaacatgtggagtgagaacagagaaaaacaagcaagtaaactacaatccgcaaaataggaaagggaaaaggaacgcaggtagaaaggattaaagttggccgggagccgtggctcacgcctgtaaacccagcaatttgagaggctgaggcgggtggatcacctgaggtcaggagttcgagaccagcctgaccaacatggtgaaaacccgtctttactaaaaatataaaattaactgggcatggtggtgcacacctgtaatcccagctacttgggaggctaagacaggagaatcacttgaaccgggaggcgtaagttgcggtgagccaagatcatgccattgcactccagcctgggcaacaagagctaaattccttcttaaataaataaatagccaggcgcggtggctcacacctgtaatcccagcactttggaaggccaaggcatgtggatcacaaggtcaggagttcaagaccagcctggccaacatggtgaaaccccgtctctactaaaaatacaaaaattagccacgcgtggtgatggcatatgcctgtaatcccagctacgtgggaggcaggggaatcacttgaagccggaagccggaggttgcagtaagtcgagatcagccactgcactccagcctgggcgacagagcaagactcagtctcaaaaaaaaaaaaaaaagaaaaaagaaagaaaggattaaagttgtagcaaccctgaggttaaaatggaggtggaaaaaattaggaccagagaggaccaaaattccagagaccacaccattttaagaaaggcctttggagtcatatagagctgggttcaaatcccagctctgccatttatcagctctgtgaacttcattaacttcacctcttttttttttttttttgagacaggatcttgctctgttgcccaggctgcagcgcagtggtgcaatcaatcacagctcactgcagccttggcctcctgagctcaaacaatcctcccactcagcacccgatcaccccaccccagctgggactgcagacccataccaccacgcctactattttttttttctttttgagagatgaggtcttgctatgttgcccaggctggtgaccgactcctgggctcaagtgatcctcctgcctgggcctcctaaactgctgggattacagaagtgagccagcacttctggcctaactttacctcttaacctcggtgttcttatctttaaattcctctaaagattgccatgaggagaaaatgaagtaatatctgaagagtgcctgctacaatgccctggcacataacacccactatttgttgaacactttgtgttattataatggtaacaccccatctgcctctctaaagaggtaaaagcagcagcctaagggcagagaaattttcagtaatgtgtaaaggtgcctaaatacctattctactaaccccttgttagccaatttaagagttctaggccaggcgcagtggctcacgcctgtaatcccagcactttgggaggccaaggcgggtggatcacaaggtcaggagatcgagaccatcctggctaacaaggtgaaaccccgtctctactaaaaaaatacaaaaaactagccaggcttggtggcgtgcacctatagtcccaactactcgtgaggctgaggcaggagaatggcgtgaacccgggaggcgcagcttgcagtgagctgagatcgcgcaactgcactccagcctgggcgacagagcgagactctgtctcaaaaaaaaaaaaaaaaagagttataattgctttttcactgagattggctctaactctcaggtcatatcaccaggatcccctgggccaaaggagtgacccctgcaagtttcaagcatttgacaggcctgctggaatgactgctaatacatttatcagtcacttgaatccccattggcataatgaccactcttgcagatccagcctaaaccttgttgccacgtacattgtttggagaataccagttcccagttctgggtcccctgtccctccttttctcaatccagcctgctttgatcaaaagccctgttctctccaatttgtagtacccgcctggggctgggtttaaaatggagatgcatggccacatattggcagacactctcacatgatggttgttaactgtagaacctttgcctggagactttcagagggtacagttaccatgacaaccaccagaaagatggcaggccagagaaatgatgcaattaaaggaaaagggaggctgatttcatgatgacaatctgaccatgacagagtatgctcactcacagatgggatagcactgtctaagtcatgaaccaggtgactattaccagaaagagaaaaaaagatgggggtggaatttaccaccaagagaccagaagatgaagagactcgttaccaaggcaactagggagaaaggaatggaaaaatggagcttcaccatagcagcagaaaattgcttctagccaagcaacacaggactgttgctatagaaacaaagagaacagggatcctacagaccatggggagaattatcaccaaaatgctgagcaggaaagactcctaaatcagaatggagcctgtggtccaaaacaaatgaggagaagtgaaaaaaaaaaaaaaggaccatttccattcatcgtaattctattagtcctaccaaaagagaatgggaacatattttttaaaataccttaggctattttatttgtagctttgtttgtctccctagcgatcttctgaactctaaattatactaaaaataggtcctgaaagatattctgtaacttgaaatcctaattggagacattaagttcaagggaaaattggggaattgaagtctatgaccaagagataataagtatttctttaaaaaactacataaaaccctctaatgggaagcttttcagggtaaaaaagagataaaagaaggcaatagggagtcagggaagctagttgtactcatgcctaggtattggctctgactcccctttctgtgaggccagaggggaaggagctcattgtgttctggaagggaggctcagaaagaaagagagtctctcacttaaaatgtatgtatatgtctagaggtgatagatgcagaatcccatctccaacgtgctccacgcattacagattattatgggcaaagaaatcctggttttaaaggcaaatgtatcaggataagttcagtctggaagagcatatctaaaatgtagaaatgaggtaccagggatactcaaattacttggagaataataattccttgcctgccctactgaaagcccacagtcagtcatttaattctcatccccactgtgtgtaagtcataccccaagggcagatatatagttaggatttctgcacctacctcaccttctttaggaaattgaaagcaatacatagggtgggatgggcacagaaagatggcagaaaaggagaacgtaggaggtgcaaaaagatagggaggaaaatctcagtgatgacccatgagtgtttattcagtagtatttcctatcctctgtatactttaaataactcattcaaaatctcttttaaaaagaaagaaatttggccgggtgcggtggcttacgcctgtaatcccagcattttgggaggccgaggccggcggatcacctgaggtcaggagtccgagaccagcctcaacatggagaaaccccgtctctactaaaaatacaaaattagccgggcgtggtggtgcatgcctgtaatcccagctactcgggaggctgaggcaggagaattgcttgaacctggaaggcggaggttgcggtgagctgagattgcaccattgcactccagcctgggcaacaagagcgaaactccatctcaaaaaataaaagaaagaaatttacagggagaaggcaaaagatgaagccattacagtaaaagggccatttaaagcagatcatccaaaaggttccagatggaattttagagtatgtggtgacatttaggacagaaaaaggaacatgctatgggaggcctgaagcatctaactccaaggtaaggaagaaagttgggtcaaagaccaacactagctttttaaaaaattgatttatacaagtttataatagagatgaagttttgccatgttggccaggctggtcttgaactcctggcctcaactaatctgcccacctcacactcacaaagagctaggattacaggtgtgagccacagcacccggacaacactagctttttggtacaacctaagatgcctttgcagcccaatcttcacactaattagctaccccaagtaaaaaatattttctgtgggagatattttatgatgaacgttattcctatattagattcctaggcttgtcataaattactacaaactgggtggcttaaaacaagggaaattggcagggcatggtggctcacccctgtaattccagcactttgggaggccgaggcaggaggccaggaattcaataccagcctgaccaacatggcgaaactccatctctactaaaaatacaaaaattagccgggcgtggtggagcactcctatagccccatctacttgggcaggggcagggattaggcacgagaatcgcttgaactgggaagggagaggttgcagtgagcagagattgcactactgtactccagcctgggcaacaggctgtttaaaaaaaaaaaaaaaatctcaaaaacaaacaaacaaacaaaataaagggaaatttattttcttgtggttctggaggctagaagtctgaaatcaaagtgtccacagggccatgcccccatgcttccctttagggaagaatcccttctttcctcctctagcttctggtggttgccagcaatctttcattgttccttaggattacaggcttgcaccaccacacccggctaatttttgtatttttagtagagatgggttttcaccatggtggccaggctggtctcgaactcctgacctcgtgatccacccgcctgggcctcccaaagtgctgggattacaggcatgagccactgcgcccggtttcattttttttttttttaagagacagagtctcactatgttgcccaggctggtctcaaatgcctggccccaagtgatcctccagcctcagcctcccagtgtcaagataacggctttttagggctgggcatggtagctaatgcctgtaattccagcactttgggaggctgaggtgggtggatcacctgaggtcaggagttccagaccagcctggccaacatggtaaaaccccatctctactaaaaacacaaaaattagctggccatggtggttggcgtctgtaatcccagctacttgggaggctgaggcaggagaatcacttgaacctgggaggcggaggttgcagtgagccgagattgtgccactgcactccagcctgggtgacagagcaagactctgtctcaaaaaaaaaataaaaaataaaaataaataaataaataataacagctttttaatttatttatttttcttttgcagagacagggtcttactatgttgcccaacctgatcttgaactcctggcctcaagtgatccttctgcctcagcctcccaaagtgctgggattataggcatgaaccactttaccctgccatctttatatcctgatgagtctcaagcctgtatcttccattcaaatccctttctaaagcctcagtatcacattttcaacttgctgggtacttcattttggatgaccccatcactttaatttcatcatgtcccaaaccacaatcagtttcttcccctgacttccctatttcaaagaggatgtttgctcttgaaaggatccccttagaaatctagtgcaatcctccttattttgtaaaaatgagactacccagccagcaaatcagaccagatttctcccctgtccccagatttgacacaaccttcttaactgctcttccccaaagctattctcttagcctagaacatccttcttttcatttagccaaatactacctgtacttctagttctggttaatgttacaatttccaacaaaaactttcatgatgactccaaacaaaatgttctcttccccttctgaggttcatagcacttctttgagacacatattgccttagtttgtgatcatgtgtgttatctttttgttattattatattacttcagaccagaatattttctgattgtgtttctatgctcataaacttccagaaggaaggaaccataccttcatgtatcattgcaaacatattgctgtcactatgtagctggcactgttctaagaactttacatgtaacaactcctttaatcttcacaacagtcctgtgacatagatatcattattatctccattttacagaagaaggatacttgtaggactcagagaggttgagtgatttgcccaacatcacacaggtagtaaccccaactccttgttttttgttgttgttgttgttgttttagagatagggtctcactctgtcactcaggctggagtgaaatggcacaattatagctcactgcagactcctcaaactcctgggctcaagtgatcctcccatctcagcatcagcttccggagtagctgggactgactaccggcacaggcccgcttgccagcatttttttttttttttaatttcttagtagaaatgggattttgctatgttgcccaggctggtctcaagctcctgaactcatgtgatcctcccacctctgcctcccaaagtgctgggattacagtcataagccactgtgcctggccccaagttcttaaccatggcatctacaccaccttctgtgaatactttttgtctttgcaaaacctgggctccaaccccttatatcaatatttttttaagtgtgccctcaggaattcacctccctccttgcttgttagcaatgcagattcctggccctgacctacggtaggcaaattctttttttttttgagacggagtctcgctctctctcccagtctggagtgcagtggcgcgatctcggctcactgcaagctccgcctcccgggttcacgccattctcctgcctcagcctcccgaagagctaggattacaggcacacgccatcatgcctggctaatttttgtttttagtagagacggggtttcaccatgttggtcaggctgctctcgaactcctgacctcgtgatccgcccgcctcagcctcccaaagtgctgggattgtaggcatgagccaccgcgcctggccgggtgggtagattcttaagacacactcaagtttgagagtcactgtcttaataatataggcattaatgactaaatggagtcagttgactgtggctcagtttaaaggcaccacagtgcccagtaaggaaaagtagagggtttgtatgtgcaatggctttgctgatgcacaacctctgctggccatgggctgtgaatgctgtgaaccagtctgaggctccagtctttgccctccctcctccgctgcctatttcaagctccccaaacctggctatttctttcctaataatttaccacctcttgaagcatcaatatgtgcactctgggaagatttattattttaccaattccttctatcatctttcagatatgactaatctatattctggttgtggcttgttaacatggtttaaataatactaatcatttactgagcacttactattgccctgacgacccaaagaagtgcatgctattatttctacctattttatagataagaaaactagggttaggaaaggttaataatttgcccaaggtcaagaaaatgctagaaaatgcagggccaagatttggaactgagactgttgggtgtgggtgaccacttaaccatactgcttcccacaagtttaaaagaaatccattatttactgggcacctactggacccttggcactgagcctaatcatttaataacacacctgattagagactttcttttttaaatatttacatttgcttgccaagagaatggtaacattaatacagttgctccctttggccaggagtgtaaataaacagacattaacaagagccgcccactgggcttacagtagaaatgcccacacaccaaccaacagaactctagctgacacatttagacacctcctctttcctccttcccagtcacccggtcatcaatcatctcccagctggttatcttatccttaaaaagaaacctctctcacactccctcctatcacttatcacagatcagcaaagccatccccatcctctttttccccttttaaagttaatattctggaatatcctgacctcgggagcactgtagacaaattcagcacgtctaagatagttcaacctgtctcagttccccaaaataactgccaacagaggcagaagttaaacatacactttagccttttattgtctaacagagatgatgtccttctctctttgctacaccaagtgtggcttctgggtcaccccgtattgtctatgtcctgagttgggagtgtgatcccttaggtgcattattcagaggcaaacctaatttgtagaaattgtcctctgaaatccaggaataaactcctgactattttcagacaaagatagaggtaggagtctgtagaaaagagctaggaaggagcttaaaatacttcgcattccagaaacaccctcccttcccccaggagatggctttattcccactcctttctcagcagagttgactcaaaagagctgaagcttggagtcaggcagctggtactaggtgtgtgggcttaggcaaacaacttaaatgtctctgagcttcagttggcttttctgtgaaatggggctgacagcatcctgctctccaagttattgtaagaattaagatatgcaaaactactaacattcatgcctgtacccatgggtccatactattgtactaagtgctttcaaaaatttttattgaattctttcaaggtccagtaaagggagatacgtcctacaaaccagacccttgactaatggcctcaaaaaaggaagaaaaatacactgggagttttaagaaaagagttccaataatccatgtcagttttaccaaacagtttcttaggttctaagtgtgttacctatgtgcagtgggggacaagtggaaaaagcttacctgataggagactgggcttggaatcctgattttgctatgactttgagcaagaaaactctctgggctccagtaccatcaggcagatattgcttacttaccaggttggagggtcacaagagggtcattttgtaaatgtgaggaattaagaggagctttttgaccgtactgaggctccataggaattcgggtgggcaataccaacccaagtcccatctgtaaggaggagttagtggaggcttctttcaccatgatgctcatggccatcctgaacagcaactgattgcttttcagtcccagatggggcccctttgcagcaagactatgccacccagcacacatatgcctcagagttgctggtcatgggacatttgctccatttcatcccaataagtggcaggcacaatagccccaaagagagttacaacaagcagttaaatgacggaattccacgtttaccttctccacataccccgtgctaacaaacaagctgatcatcataatatagtgactaagacctcttgctctggagataggcagagctggtttcaaatcacaactgaattacaagcttgtgaatttgcatagctttgtttactcttagaacctcagtttcttcatctgtagccctgacacatggttgatatggcagagtgttcagacataagcagtgccctatgaggaacagctattactgaattcccctgtcttgcatttacagcaagtttatgagaactatgggaggaaaatgaagcttaaactttctttcattaattaaggaggaagaatgttttttttgagacagggtctggctctgttgcccaggctggagtgcagtggcgcaatcttggctcactgcaacctctgcctcccaggctcaagccatcctcccacctcagcctcccgagtagttgggactacaggcgtgtaccaccatgcctggctaatttttgtattttttgtagacatgggtttttgccatgttgcccaggctggtcttgaactcctgagctcaagcagtctgcctgcctcagcctcgcaaagtgctgggattacaggcataagccactgcacccagccaggagaaagaattttaaaactatctttctgtaagaaaaaagtacattgcaacataaattctcagaaaaaaactttaaaagacatcttgcagaaggtcatcataccactaagataagaataacaccatcctaaagagtataaggctttatagtttagaaagcagttttaagtctaccccttcatttaatacctgcaaaaacccagtgaagtagcatttatccccattttaccgataaggaaactaggactcagaaagatgaaactaaaggctgcagaagtggtggagccaggatttcaagccttctaaagtacaaattcagcactctttgcaattcacaagagaattccgtgttcactgagtactgagcctacattgtttcaacatgtctgaaatggcatttcaggaacccagagtggaatgaccaggttagcaacatggttagagaagtgcagccctctggatcacttgtggctaccctgaaatagttttccgtggttgaggaggactcaggtggcataagctgcccccactctgacatgtttgagaaatcttttattagaagatgtcccagaaggcaacattttaaaatcaggcaatcagtaatcacaactaaatacaaaatttcaggtgaacttgcctttcaaaataaatcagacccttgcaacaggaaattgccccaagagtttttttccttgtacaaaaacagttaacaccactttgcaaaaggcatacaaaaatacaatataaaaaaaaaagactcccccagcataatagccaacagcagcttataaaacacaagctattcagttgagacatcagtaacctacacccaaactgtcctccatagacaattccagaagtcagctggcttttgtaaaccatgctccagaagggtagagaggctatttccaaacatcccctggggtcctctgaggccaagaagcaacctcagaaagaaaccattatggacaatagatttggaagtagcagctggttttccagagccatatatagtacttaccaccccctacccaccccaacttccaaacccagagccagcaggcacctgctgtcctgggcagagttctggaggggctgctggtccttcttccaggacaggcttagaggtgcctgaggttacccacatgacaactgctaggttgggtgactttcccagactagaagctgcacgtggattccacttggagctgccgagtccagctggggtaaaatccatcatggttggctaagcatatctcctggaggctcctttaaaacccaccagaagcaagtccaccttctggagcactggatgagtcccaacagctctccccaaaacttcagaaacgcccagattctgggaaagatatctgattcatggcaggctggaaggggcccaagggtggctgcagagccagcaagctccttggaattgcatgaggaggacagatttgcatggttccagaagaacttcaaacttgccgctcaaggattgagatgaggcaggtgggaaagaggcagcagtacagttctccctctgaggtgtcttacacctgccttgagaaaagactgggcctcaagtgcccctcggaaaacacctgggcagggatcaagttcatgggccaggactccaagctatccccaggccccaggctaggaccgatttccctgtgtcttggggaaatatttctgacctgtgggaaagggtgctgtagagcccattgcataacaaggcataatggaacaaaaaagtcccttgtgaggaaagaaaggtccctccctcagaggagagagcccagagggctctgagacaaagaatctagaggccaagctttttaagtgttcccagggtcgcagcattgggagtgggaggaagggggtcagctaacatcataatatataaaggtttccaactccttggctactgtaaagtgtctgacagtgaggtaatggtcaatgttgatcaagtctgcaagcttgtcttcacccaagacagctcgtgtgtcttctggaaaaaggagcctcagggagagcatccaggcccagctgtccttgcatcaccccagagacaccagttgggagcatcctttcctagcctaaagctcatgcagagtgtgagatttcatgcaggctggagcccctgacaacatccaccacctgttgcatagcatctgtcagccttttcttcagagctagtgagctaggcagaccccaaggctcctcagtcagctgcctgctgggaagccaaaggcgccagagaacatacagcactcccatgagtcagggaagagggagagctgggtttcaaggtttccaagaatgcaagcctttattgtgtgtgcaccggctgcaatgcattctgggatctactgtccagactgtcccaccataaccaaaatgtgcaaattactaaaggggagagggaggttaaaaaataaacttgtgtcttcgtaagacagaactgtcaggctttttggtcagttagtagccagtgaggtatgcaattcttttctgcaactgctgctgccggcatcggagctgtcttttctctgtagccatcctcttctcagcccccaccagggcttgcaagtattccaaggccttgcttaggatcactactttgggggccttggagcagctggccagggtgggcacctggtccctcagcgccaagaatcgcgaacgcaggtcattccgcctcttgcgctccaggaagttgtgattcttcctcttggtcacatcctcagtatcagaactgacaggtttggggtggcaggactgggcagcctcactttctacaggtgggggactcacaatctcttcatcctcctcatcttccttttcccctgcagcatctctctccagaacctcttcttggggacccctctctgaagcctcttcttgggagcagctttctggaggaaaacgggcagcatagttgtgctgttgctgatggatggagatgtggaaatgcttcatgcagggatccagggggtctgctcgcaccgtgatggtgaccggcttccgaatacccagagactgcctcttctctactgtcacaacatcaatttcttcattctctgtccgagaaaagagatcaagagaagaaacacatcccatgagaaacacaaacatagaccctacagctttagctgtctacgctggtgcttgggaaggtaggagacatttttccaatttagatatatacaaatcgaggtgagcagaaagctgattcatttgtaatgtggtaagggcacagtgaaggaaaggaggggacattagcaagaaggaaaatattctccaatttccttttgcacagcaaggcttagataagaacaaaaggcagacccaagccaacagcccccagtctgcaaaggctctcccctcccccacggaggggttggagagaaagagctaccggcctgggacaaagtttagctataaagatcttccccagtcgggctctttcatgccccatcagaattgtaaatgaggggtctgtgggcagagctgccctttgttcctgcccagcacagcctgcacttggggaattgttacttttcacaagttataaatcctattattcccccacctctctattctgccatccctttcagctgaagattcagagaagggagggctacaacccatccctcttcacccacagaggggagggaaagggtttcccttaggagcattttgctcctgggttcaatgggtttctaaagtcatccatcatttataggtcgcctgccccacctccttccctggactagaaggttagatttgtaatcataggtcggcgaagctgcaggaacttcacaaaggtacaagcgaccatttccaaactacctgcaccagaggcagagactgggcagcagaatgtcccagatatggggctcataacaccagagacctggagacacctggacacgcccttctcattcactggcttgaaggtctcttaggttaacctaaccaggagaggggcaattgggagaaaagtctcctcctgctccacacattttgcagcctccacacagaagtccaccttaatggatctcggcctcgcaaaggaagagctccgttctcagcttctttgcatatcaggaagcttgagcccctttgtcaggaaggcttccattgtgtggacaatcgcattatttctccattaataaacctgaccattcagccctcctggccccaaagcccatgattggctgattacgctgtgtttggacttctgtcttacccagcccctagcccctattgggtgagctctgctgccaatcactttccccaccccccgcctcattgtttgcaatctgttgcattttgttccaggccatgtggcctgtgagtgaactagaagctcacaaacaggttcaggttaaagggtaggttagaaaatgattcagcaggcttccctacatcccaaacctttaattttcagtgttaagcctcgtggctcaggaagattctatctaagaaagaaataatttaagacaccattctccctttcagagagtagtgtcttactctatccagacaaggaaatgtcatcagcaggacaatcaagtccaaccccatcgtgtgcaaatggggaaactgaggcccagatcagcgaagtccacatatcacctttgtaacgttctggatctcaaactaaaatgtccaacttccaaagcaatgctctttccactctaccactccaccagccgttgtagagatacatctttattggttttttgatctcaagattctctttccagccattaaacaaacataaactcttggtgtagaaagcaagctggttaaaaatgaccttaacacagtggaccaggaaaaaaaagacttttaatttttgttatcctattttttctctcaagtgtaggaaaacttccataccccattccccagttccctatcaaatggtcgtgtaaaagttattcctaaaagctacagtgagctttcttggtcctaatttatttgtcactagccacagtctacactctacaaaaataccctctccaggatttctcacgggtgtggaggtctaagatgccagaataagaacaatgtagtttagtggcacaggatgccccagtctgccctcagcgaggttgcacttgcatcaaggatgggagaggagggcctggagttctactgccttgaccccagcatgtagcccacagattgccacaaagtaggggccagtgaatatttgttgaatgccagggagcagctgacgctggagatctattgagggggagcaagaaggacacttttccatctcaggacaaacagcaaggcaaggtgtagtgcttctaagataagctaccacaaagaccccaaacatcaaggaagaggtgcctggttgggatggagcattggggaagaggggctggctagatggcagaaagctggagctgacttgtagtgattgtctatctctaagcctcagtttttccatctgttaatggggagtgttcattcttccctccctgtctcagggatgcacgagtggtaagtggtggtggggaggcacgagaagagggcatttattattggcattttaaagtaaagccaactggagacctaggtttttaaaaggacgaaggttttggctttgcacaaaaggctctcggcttcttctccccctaggggagtgtgagtttcctagggaaagaggcagcagcaaaaaaacttcaggtttggagtgtctcttaaggtacccccttcaatcccttacagtccaaccccagtattgtcctctctaagcgccaaccctcacctcaaatcccttgtcccctggggctccaataatcatcaaagggaggctggctcccacgccacttttccaaactgtttaccaacacacccacgtgccagacagacacggttggggactacacgggcagcttcagccaaagagaggcggagatggcccaagagcttgagaagagccaatgcctgacctcaggcaggggcagagctttggccacccatggggtggccccctcttggatggctcggggaggtccttacccgagtcgcttgggctctcggacccggagcaggcctgggtcttgggttcgcccagcggacagggggcggcgggcgccgggttgccggcttcgaggctgggagtgcagtccggggcggcggacgccttgggcgggttcccccggggcgcgccaggagcgagccggtcgctcacagctctctccagccgttcccgggccgagaagccgctccacatgcagtcacggcgtatgatggaggcgtagttcctgccccagcctttcgagtggccccgggattccgcttcgtctccggtgcaccctccgggccacggctccgggggaccaatcccgggggccgggtcccctgcgccgggacccaagccccagggcggcgacgtggggggcgatggcaccagctcgaatttcttccagatgtcctcgctgggcgccgtggagcggtagaaatcctccccgcagtcatagtcgtagaaatagtgctggtacgagtcgtagtccatgtccgctccctgcgggagggaaggggggacgtgctgaccgggtgccggccgggcgaaggaggtgtccccgggtccctcggcacagtcggctgccgggctctcgttcctccccaaccccaccagcttgcagcctgcgcccagtcctcgcgtcccgggaagccgggccccgggtcagagtggtaggggaagccaatcgcagcgcgcggacccgactgtgggcagcgagttcaaagcaaactttgccagcgccgcccggagcgcagctcccagggcccggcggggccgggcgggggcgcgccgtgcccagaaggcagcctgcagccagcccgcaccgcgggacccgcgcccgtgccctggccacccgcagcctcacctcgctccagccgcccgccacctggagcggaccggctccccgccggctcggggcagcccggcagccagcacacacgcacatgcgcgccgccgagagcgcggcccgcactcacaagcgcgccccccccgcgcgcgcgccctccctcgctcgcgcacggcggcccggacgctctcgggatcggcgcgggagcgcgagctgcaggcgcattgtttcctgactgccttatatctcgtcgcgcgcccgggacccagggactggggggcgggccctatgggacaaaccccgccctctccctgcctactacgggcagtcgacaggtggggccggccccacctcctggcagcgctcgcccgctccgttcaatccccggtagccccccaaataaattgcacgctggggagcgcaaacaggaggagggctgatgcggcccggcggccgcttggcggtgccagccggctgagctaaaccgtgctccttgcccactccgagctggggaattagggctactccccgccccaccctgcgcgcctactttccccggcgcaccccgctgggttcaggtgcgcccgagccgccgcgaggggtagggggagggaaacgcgccacctggcggccctcagccctgaacttgggctggtcccggcgtccgtctggtcacccgtcggcccgtttcttgagctcagtggcccaagcctggatggcatcgaagcgaagattccgggatttagagcccgaaacgtaaccttcctgagcttcagtttcatctgtaaaatgaagggatggtaatgcttacctcacagggttgttgtgaggcttcagggaaataagagcatctagggaaggggtctggtctaggtggagaggcagacggcgctggcttagcccccgctttggggaggcggtgcagaaatgaggaatttttcccagggcaaagccagctgagacccgccatgctccctctcatctcacacaaaacactgtaggagctgtacagtagagaatgaggatttggcatctggaaaatactgcaggaccaagttgtttcaagttttgccctgcattgctggccaagatgatagataacccctttgtataatcttctttttaaattttaaatatattttgttaagagacagggtctcactcagcgtcaaggctggagtgcagtggctcgatcatgactcgctgcagcctcgaactcctgggctcaaatgatcctccctccttagcctccgaaagtgcagggattacaggcacgggtcaccgtgctgggtccccctttgtgtcatcttctacacagatgacctttggtggaagagaaaaaattaaactatacggccagtctgagatttaggccagaggagagtaacttgggacagcagccaatacatctagattcctccacctggcatcaaggtctggtgtctgtctaccccagcctgattgtctgctgtctctctctttccctcccacccctgtggtctaagaacaccaaactactcactgttggcagacggaagtgagaagggcaagcaattcagtgtggttggagcatgggacacggatgtgtgttgttatatgggttgggaaggcagggaaaatgacagccttccgttttagatacgttgggtctgtgctgcatgtgggacatcttgaaggcagaaacctgctcctacttgctttgtgatttctgcacctagaacagcttctggcagacatttgtgaactaactgacttactgagggactcagctaaccagatttcactgagacagcttgtgtgccctgctttgtgctaaacggaagacacaaatcagaagggttccaggtttggttgcagccccaaggcacaggcattggattgtcctttagtgacttttctctggtccacagatgtctgagatggttgctgtactagtctgggttattggttacaaataacaaaaaccaaccttaggcagggcacagtggctcacgcctgtaatcccagcactttgggaggctgaggcgggcagatcacaaggtcaggagatcgagaccatcctggctaacacggtgaaaccccatctctactaaaaatacaagaaaattagccgggtgtcgtggtgggcacctgtagtcccagctactcaggaggctgaggcaggagaatggcgtgaacccgggaggcggagctcacagtgagccgagattgcgccattgcactccagcctgggcgacagagcgagactctgtctcaaaacaaaaaaacaaaacaaaacaaacaaacaaaaaaccaaccttagacaaatgtaagcagaaaatgactttattggaataattggtggtatagacctcaagggaggctggaaatttatgtttggagaatgggccttctttacctagactacagcccccaccctgcagctcttcccatggtttcattgtagatgatatatgggggcaaccaggaggtgctgcccctcctcaagaagtaggaaaaaggaaattaagttgtcttctgagagttaacactgcttcttcactttgcatacttttgtttgtttaatgtcttcctcgtcagactgtaaactgaatgagggcagacaaatgtcagccttattcatggctgtaccccagggctttagaacaaagcctggcacatcatgggtgctgagtatatgactgaacacaaaactctaatgttttagtttttgcgttttttttttttttcctttaagacaagtctcactctgttgcccaggctagagtgcagtggcgcaatctcggctcactgtaacctccgcctccccggttcaagtgattctcctgcctcagcctcccgagtagctgggattacaggcacctgtcaccacgcctagctaattttttttttttaaagatcatactgcttctgtccctttttttttattattattatactttaagttctagggtacatgtgcacaatgtgcaggtttgttacatatgtatacatgtgccatgttggtgtacccattaactcgtcatttactttaggtatttctcataatgctatccctcccccctccccctaattttttgtatttttactagagatggggtttcaccatgttggccaggctggtcttgaactcctgacctcaagtgatccacctgtcttggcctccgaatttttttgttgtgtttttttgagacagggtctcattctgttgcccagactggagtgcggtggtgcaatcatggctcactgcagccttgacttcctgggctccagggatcctgctacgtcagcctcctgagtagctgggaccataggaggcatgcaccaccacacttggctaattttttgtagagatggggtctccctatgctgcccaggctggtctcaaactcctgggcccaagtgatcctctcaccttggcctctcaaagtgcggggattacatatgtgagccaccacatctcacctctaatgctttaaagtagagatatgccaattgtattagtttgttttgacactgctgtaaagaaacacctgagattgagtaatttataaacaaaagaggtttaattgactcatagttccgcatggcttgggaggcctcaggaaacttacaattatggcagaaggggaaggagaagcaagcatcttcttcacaaagcagcaggaaagggtgtgagtgcaggaaaaactgccatttataaaaccatcgagtctcgtgagaattcactcactatcacaagaacagtatgggggaaactgcccccatgatccatcacctcctaccaggtttctctctggacacatggggattacaattcgagatgagatttggttgcagacgcagagccaaactataccttatagagacagaagaactctcaggcccagtctagactacaacctggttaaaagtattaatgcagctaaagaaagagggtgccagttaggagggtctgggcagccaaggaagccagagatcagggagagttgccaagacaatcaccagcagtgtcccttctctggggacaaagatgctggtccaggaaaaagggagatggaagtaccattctttggagccactcaattcaccccctacctcactcatgctctggatcaccaagcaaccctctaaaaaccattctgtttcctatgtagatcagtccacagggagagaatgcactcatcattgaacaggaagatccagtctgcttcaaagccctgcttcctcttataaattaatgaattggcatctgatttgcaatatcagtctcatgaacctggttaatgtgtgtctgttctgtagagatgctgctgcttttagggctaacaactctggtttctaagctggacccaggatgctgatgaatttaccaaggtaacaaatgctaccccagggaccttccatttttctgcaatattttatttcctttattttttctaaaatatgtttttaatcaaaatacatgtaataattttttaaaaaatcaattaggcatatggcaaagttaaaaaaaaaaggccatcttctgtcttgccatcaactgattcccactccccaaaggcagctattgttttagctttttgttttttgtttttgtttttgttttttgaaacaaagtctcactctgtcgccccggatggaatgcagtgatgtgatctcagctcacatcactgagtgtgtgtgtgtggtgtgtgccaccatgcccggctaatttttatatttttagtagagacagggtttcaccatgttggtcaggcaggtctcaaactcctgaccttgcgatctggctgcctcagccaccatgccaggactgtccctcatatttctttccatattttgaccaatacagagatctactttttcctgatttttaaatttctttctttttctttatttttttgagatggagtcttgctctgttgcccaggctagagtgcaatggcatgatctctgcttactgcaacctctacctcctgagttcaagcaattcttctgcctcagcctcctgagtagctgagactacaggtgtgcgccaccatgcctggctaatttttgtatttttagtagagatggggtttcactatgttggccaggctggtctcaaactcctgacttcaggtgatccacccacctcagcctcccaaagttctgggattacaggcgtgagccaccatgcccggccctttttctttttcttttctttttctttttttaaattgcccttgcagagcaagcctaactcatactcataggtagagcttccagagccagcctaaatttcctttactttctttttttttcttttttcaagacaaggtctcactctgttgcccaggcttgagtgcagtggcaccattttggctcactgtagtctcagcctcctgggctcaagcgatcctcttacctcagcctccctagtagctaggactgcaggtgcacaccaccacacctggctaattaaaaatttttttttcttttcttttctttttttttttgtagatacagggtctgactatgttgcccaggctggtcttgaactcctgggctcagtgatcctcctgcctgggcctccccaaatgctggcctaagccactgtacccagtttataattcctttcttatacaatattttttttcagtgttaaattgcctcagtttttcttttgcttagatttctacatatctattatgaatttaaccctacacattcccactagagctacaaagattactccatatggtcaaacacactaggtaatcagtctatcagttacattttttttctaggaatcatcttggttggagtcctttgtcttcctgttctagtctgaacttattgatctcttggcctgcttcacaattgtcatcctgtgacttccctttaccatcatcttggaaattccctctgcttctctcctgtgtcgcatcccctgttttctggagcttgtttcttcctctttctcgttttacttcctcactttggtggagcatatcctccagcagctgctttgagaaaaggtacttgggaagtaaaagttttgagactttgtgtttctgaaattttctttggtataccctttggttgatggtttggctggctagagaatattagattagaaaataatttcccctgagaattctaaaagtactttttttctgtttcttagcagccagtattgctattgagaagactgatgtcattttatctacaaacctttgtatgtgacctgtttctctggtagcttttaggatatattctttgtccctggcattttaaatgttttcaatgatgtgccttggtgtgggtctgttggaataaagaatttattggcctttctccccagttccttggaggtaacctctaaatccttggaatttcccaggtaataggtgtgtctgttatttatggcaggcactgatagcttatgctaataaggtggcccatgggggacccctagatagtttaagatgactcatgataggggctgtccatgccagaaagacaaaccatgtgattagagtgctgggcttttgagccacttgataatcaatctgacctctgggcaggggaagagggctggagatttagttaaataatctggacaatgattcagttaatcgtgcctacataatgaaccctcaataaaaactctggacactgaagctctggtgagcttttctggttaataatagtctgtgtgtattgttacacatcaatgtgccagaggatgatgcatcctgacttcacgggaaaaggacactggaagctttaagtttgggatcctccaagaccttgccttttgtgtctcttcttttgcctggtcctgatttgtattgcctttgctataataaaactgtaactataagtttagtgctttcctgagtttggtgttctgtggaattattgaacctaagtaggtagtgggaacccccagatttgtagtcatttggtcagaagtgtgggtggcctgggaaaccctgagcttctattaatagctggtttctgaagtgaaggcagtcttgtggagactgtgccattaacttgtgaagtttggcctaactctagatagtgtcagaattgcattgcagcatctttttgaattctttgcgctaagcctttttatttatttatttatttattttatttttattttttttagatggagtctcgctcgtctcccaggctggagtgcagtggcgcaatcttggctcactgcaagctctgccacctgggttcacgccattctcctgcctcagccttccgagtagctgggactacaggtgcccatcaccacgcccggctaactttttgtatttttagtagagacggggtttcaccatgttagccaggatggtctcgatcttctgacctcgtgatctgcctgcctcagcctcccaaagtgttgggattacaggcgtgatccactatgccctgctatttattttttttaaattgagacggagtcttgctctgtcacccaggctggagtgcagtggcacaatctcagctcactgcaacctctacctcctgggttcaagcagttgtcccacctcagcctcccaagtacctgggattacaggtgcccatcatcatgcctggctaattttgttatttttagtagcgatggagtgtccccatattgggcaggctggtcttgaactcctgacttcaagtgatctgcctgccttgacctcccaaagtgctgggattacaggcaggcgccaccacacccagctgccctaaatcttttaatatggaaaccaattcactctgtaattattcctttgggaaattcctcccctccattttttttcccttctccctctctgaaactcctgtcttgtcttttcttttctctcatctctacctttatgtgttctgttcaacttcctaggagtcaaacttctaatccttttttttttctaaaataaaaatagagatagggtttccctatatttgctaggctggtctcaaactcctgagctaagcaatccacctgcctcagcctcccaaagtgctgggattataggtggattattagtgtgagccaccacacccagccaaacgtccaatccttttattcatgttctcaacttccaatccttttctcaacttaaacattttttgactgatattttttaatttttaagacctctttttcttgttgttccctaaatgttccctttttggagcttcctgttctttttccatggacacaatctttttcccattttcctctgaggctattaataatagttttcatacttattataaattttgaaagtctttcctgctccctgttttctctgacttctcccttgcttactttgctctgtgtgtttcattagaggctttctcaaacatccgataatccttggtatagatgtttatgtatattacagagtagagccaggcatggtggtgtgcatatgtaatcccttgggagactgaggcaggaggattgcttgggcccaggagttcaagatcagcctgggcaatatagtgagaccacatgttaaagaaaacaaaacaaaacagtgaggcattaaaagctgattgaaagctctatatgtgtgtgtggggaggtatttgattactgagcttcactaaagggttttaggcaggtacctagcaggggactcctcaactgtcagtatgagtacatctttctttttcttttttttcttttcttcttttcttttcctttcttttcttttcttttcttttttcttcttttcttttctcttcttttcttttctgggacagagtttcactcttgtcacccaggctgtagtgcaatggtgcaatctcggctcactgcaacctccgctttccgggttcaagctattctcctgcctcagcctcccaagtacctggggattacaggcgcctgccaccatgcccagctaattttttttttttttgagacggagtcttgctcagtcgcccaggctggagtgcagtggcacgatcttggctcactgcaagctccgcctcccagggtcacgccattctcctgcctcagcctcccaagtagctgggactacaggcgcctgccaccatgcccggctaattttcttttttttttgtatttttagtagagacggggtttcactgtgttagccaggatggtctcaatctcctgacctcgtgatccacctgcctcagctttccaaagtgctgggattacaggtgtgatccactgcacccagccgcagctaattttttttatttttagtagagacggggtttcaccgtgttggccaggctgttctcgaactcctgacctcaggtaatccacccacctcagcctcccaaagtgctgggattacaggcatgagccacctacctttctattttcacatatagaaggcctctaatctaccagggcgaggttagaaacctggctgccagccttctgggtaccaagaggggaaaggagatgaagggatctatcttatggttcagctaatccctccctgacttcagtacagtccatcactcttgttctcagctgtgcctggtgttcccaaatccacagcctctcaattcaacctgtctcccgccaggtaggaagagggcagtcacctgattacagaagttgagggagaaaatttaggagtctaattccttttactttcatccaatcttcttcttttcagccccatcctaccatcctgcctttagaaatatccagtgcctccagttgatgagctgttcttgggttctgatgcactcatgggcttgctccttgttgatacttctccttctcccactcccaccataagcagttagtttctgatttttctggccttttgctaaatcagccagcccttatctgtctgctttcaagcttcacaaggtttgtatatatctgtcaattgctgttgtctcctccccctcattttctttttttaaaaattgaggaaaaattcacatgccgtaaaattcaacattttaaccatttaaagtgtgcaattcaggccaggtgcagcggctcatgcctgtaatcccaacactttgggaggtcaaggtgggcaaattgcttgaacccaggagttcgagactagcatgggtaacatttctacaaaaaaaagacaaaaatattagctggccagcatggttgctcacacctgtaatcccagcactctgggagaccaaggtgggcggatcacctgaggtcaggagtttgagaccagcctggtcaacatgacaaaaacccatctctactaaaaatacaaaaaattagccgggcatggtggcacaggcctgtaatcccagctactcaggaggctgaggcacgaaaatcgcttcaacccagaaggcagagcttgcagtgagccaagatcgcgccactgccctccagcctgggcgacagatcgagactctgactcaaaaaaaaaaaaaaatgtattagctggatgtggtgttgtgcgttgcagtcccagctgctcactcagggagctgaagcgggaggactgttctagcccgggaggttgaggatgcagtaagccatgattgcagtgctgcactctagcctgagcaacagagtaagaacttgttgcaaaaaaaataaataaataaaaaataaaaaataaagtgtgtgattcagtggtttttttatttgcctatttgtgccaacatttgttattttcttttttttttcttttacgatgtttcttttttatttatttatttattttttattgatattcttgggtgtttctcgaagagggggatttggcagggtcacaggacaatagtggagggaaggtcagcagataaacaagtgaacaaaggtctctggttttcctaggcagaggaccctgcggccttccgcagtgtttgtgtccctgggtacttgagattagggagtggtgatgactcttaaggagcatgctgccttcaagcatctgtttaacaaagcacatcttgcaccgcccttaatccattcaaccctgagtggatacagcacatgtttcagagagcacagggttgggggtaaggtcaccgatcaacaggatcccaaggcagaagagttttttagtacagaacaaaatgaaaagtctcccatgtctacctctttctacacagacacagcaaccatccgatttctcaatcttttccccacctttcccccctttctattctacaaaaccgccattgtcatcatggcccgttctcaatgagctgttgggtacacctcccagacggggtggtggccgggcagaggggctcctcacttcccagtaggcgcggccgggcagaggcgcccctcacctcccggacggggcggctggccgggcggggggctgacccccccacctccctcccggacggggcggctggccgggcggggggctgaccctcccacctccttcccggacgaggtggctgccgggcggagacgctcctcacatcccagacggggtggctgctgggcggaggggctcctcacttctcagacggggcggctgctgggcggaggggctcctcacttctcagacggggcagttgccaggcagagggtctcctcacttctcagacggggcggccgggcagagacgctcctcacatcccggacggggcggcagggcagaggtgctccccatatctcagacgatgggcggccgggcagagacgctcctcacttcccagatgtgatggcggccgggaagaggcgctcctcacttcctagatgggatggcggtcgggcagagacgctcctcactttccagactgggcagccaggcagaggggctcctcacatcccagacgatgggcggccaggcggagacgctcctcacttcccagacggggtggcggccgggcagaggctgcaatctcggcactttgggaggccaaggcaggctgctgggaggtggaggttgtagtgagcggagatcacgccactgcactccagcctgggcaccattgagcactgagtgaacgagagtccgtctgcaatcccggcacctcgggaggccgaggctggcggatcactcgcggttaggagctgcagaccagcccagccaacacagcgaatccccgtctccaccaaaaaaatacgaaaaccagtcaggcgtggcggcgtgcgcctgcaatcgcaggcactcggcaagctgaggcaagagaatcaggcagggaggttgcagtgagccgagatggcagcagtaccgtccagctttggctcggcatcagagggagaccgtggaaagagagggagtgggagaccgtggggagagggagagggagagggagggggagggggagggagagggagagggagagggagacggagagggagaggaatatctctattttctttttttttcctttttttgagatgcagtcttgctctgttgcccaggctggagttcagtggcacgatctcggctcattgcaacctccacctcctgggttcaagcgattcttctgcctcggcctccagagtagctgggattataggtgcgcgccaccacccccagctaattttttttgtatttttagtagagatggggtttcaccacgttggccaggctggtcttgaactcctgggctcaagtggtctgcctaccttggcttcccaaagtgctgggattacaggtgtgagccacagccctgcccgttattctcgagcttattattattattactacagccatctttaatgggtgtggaagtggtatctcattgtggtttttttgtttttgtttttattttgttttttttttttttttttttttttttttagacagggtcccacactgttgtcgaggctggagtgcaatggcatgatctctgctcactgcaacctctgccttctagtgggctcaagcaatcctcccacctctgcctcctgagtagttaggattataggcatgcaccaccaaggctgggtaattctgtattttaccaatttattttatgttattattattattattatttgagatggagtttcgctcttgttgcccaagctggagcgcaatggcatgatcttggctcactgcaaccactgcctcctgggttcaagtgattctcctgcctcagcctccagagtagctgggactacaggcgtgtgccactatgcccggctaatttttgtatttttagtagaggcagggtttcaccatgttagctaggcttgtcttgaactcctgaactcatgtgatctgcccgccttggtctcccaaaatgctgggattataggcatgagccaccacacccggcctattattattttttgatacggaatctcgcttgttgcccaggttggagtgcagtggcatgtctcagctcactgcaacctctgcctcccaggttcaagcaactctcctgcctcagcctcctgagtagctgggattacggacacatgccaccacatccagctaatttttgtattttttagtagagactgggtttcaccatgttggccaggctggtctagaactcatgaactcaggtgatccgcctgcctcagcctcacaaactgctctgattacaggcatgaaccactgtgcctagccctaatttgtgtattttagtagagacagggtttcaccatgttagccaggctggtctggaattcctgacctcaaatgatgcgtccaccttggcctcccaaagtgctaggattacaggaatgagctaccgtgccgggccttcttgtggttttgagttgcatttctctaacaactaataatgttgattatcttttcatgtgcttattggctgttaatatatcttgtttggataaatgtctattcaaatcctttgtcactccccacttttttttttttttttgagacagggtcatattctgtcacctaggctggagtgcagtagcaccatcacagcttactgcagccttgacctcctggtctcaaacaatcctccccgttcagtttcctgagtagtgtagctgagaccacaggcatgtgccaccatacctggcttgcttatttatttatttgagatattgtctcgttctatggcccacactggactgcagtggcatgatcatggctcactgcagcctctacctcctgggcttaagtgatccttctacctcagcttcctgagtagctgggactagaggccagccaccacacccagctaatctttttttttttttcaacacacagtctcacccggtcgcccaggctagagtgcactggctctatcttggctcactgcaacctctgcctcctgggttcaagtgattctcctacctcagcttctcgagcagctgggattataggtgcatgccaccatgcccggctaatttttgtatttttagtagatacccagatcttaccatgttggccaaactggtccccaactcctgacctcaaatgatctacctgcctcagcctcccaaagtgctgggattacaagtgtgagtcaccatgcctggccccagctaatcttttgatcttttgtagaaaggaggtctctctatgttgcccagggtggtcttgaactcttggactcaaagggtcctcctgcctgggcctcccaaagtgctggtattataggtgtgagctaccacacccagccacctggcccatttttaactgagttgtctttttgttgtcatgttgtaagaatttattatatagtctggatactagactctttttataaaattttatatatttttaagagccactcagagctcagtgtcagtggggataaaactggatactagactttatttttttcttttgaggtggtgtcttgctctgtcacccagactggagtgcaatggcgtgatctccacctcccgggtacaagtgattctcctgcctcagcctccagagcagctgggatcataggcgcccaccaccatgcctggctaatttttttttgtatttttagtagagatggggtttcaccatgttggtcaggctggtcttgaactcctgacctcaggtgatccacccgcctcagcctctcaaagtgctaggactacaggcgtgagccaccgcgcctggcgttcctttttttgtgtgtgtgctcgtaaattaaaacaatttcttctaatccacttgctgtcattttagtggaatttcaggagtggagataagcacatgtgaacaatcttcatatttagccagaaatttgttcttccatttatttattgattgattgagatagggtcttgctctgtcacccagcctggggtgcagtggcacaatcttggctcacggcaacctccacctcctgggctcaacggttctcccacctcaacctccggagtaggtgaaactacaggcacacggaaccacacccgattaattttgcatttttagtaaagacagggtttcaccatgttggccaggctgatcttgaattcctggactcaagcgatccacttgcccaggctcccaaaatgctgggattacaggcatgagccactgcatctgggctgttcttccttttaagctgcaacaatttcttttcttttcttttttcttttcttttcttttcttttttttcttttcttttctttctttctttctttctttctttctttctttctttctttctttctttctttctctttctctctcttcctttatttctttcttttccttcctttgatggagtctcgccaggctacggttcagtggcacgatcttggctcactgcaatctgcacctccgaggttcaagcgattctcctgcttcagcctcccaagtagctgggatcacaggcatgagccgccatgcccagctaatttttgtatttttagtaatgatggggtttctccttgttgaccagaatggtctcgatctcctgacctcgtgatccgcccaccttggcctcccaaagtgctgggattacaggcgtgaaccactgtgcccggccaacaattcttattttcattaggcagattcctgatccaggttgtctgagagggctttctggaggagggaaatttgatctgatccataagatgtctaggattttagtggaagtaaggaggtgaagaggggagaggaggagaaaaaagatttagggaggggagagttaggaagaggaagggctctggagctggccccagaagaattaaccaggtgtaaaatctggtttcttatcctatatctgtggctctgttaccttggcttgggtttcactgcaaagctgtgctttccttagaaccctaaggaatgtggccttgctttaagttcagtgaaaaaggggttcaggagatcttgtgtctccctctgcagccaacctggggaagggaccaggcttagagagaaaacagcagctttcaagaacaggccaggagtggtggctcccgcctgtaatcccagcactttgggaggttgagacaggcagattacctgaggtcaggagttccaagaccagcctggccaacatgatgaaacccgtctctactaaaaatacaaaaattagccgggtgtggtggcgggcacctgtagtcccagctactcgggaggctgaggcaggagaattgcttgaatctgggaggcaaaggttgcagtgagccgagatcacgccattgcactccagcctgggtgagaagaacaaaactccatctcaaaaaaataaaaaaaaaaaaataaacagaagtaggatgaaggaaaaactactctgaagcagtgttacggtgagcaggcttgtactgacccttagttttctcatctctagagaggttttttcctatctagcagcattattggagaattaaattaaactgcaaagttttagcacagtgcctggcacagaggagaattccaaaaatgtcagttttcttctcttcttctttttgtttttttaattttgagacagagtctcgctctgttgccaggctggaatgcagtggtgcgatcttggctcactgcaacctccgcctcccaggttcaagggattctcctgcctcagcctcccaagtacctgggactacaggcatatgcaaccatgcccagctactttttatatttttagtagagatggggtttcaccatgttggccaggatggtcttgatcgcctgacctcgtgatctgcccacctcggcctcccaaagtgctggaattacagttgtgagctgccgcacctggcctggacatttaaggtaaacaatctgggtaaggtcccaatcaaggccctcaaagcctggctaaggaacttgtactaaagctgaaagcattggagaatcataggaggcttgtgaacggaagagtgacagatatatctgtgctttggaaagatcacttctgggagaaaagagtcctggtgtaatgcaggatgcagcatcctgagccccagatctgcatctaacagactccatggtttcatctttgcccaacacatgaatggcctccatcagtgtttccccagtgggctatgaattgtgtgagagcttgattcctaacacaaactgaatcttccagtttaccttctcagagatagagctaattaattgcaggggtcagggtcaggcggggtattccccaaacctgaagggctaatatagccagcctgagctgccacacagaggatgagatgggatttctgagcagctctggagattgtgataatgactaaagcccaaggaggccctcctggcactccccctcacggggacataatactaagtgacttgtgcttgagggcaattgtgagactgttatgtaccctttttaaggtactttttttttttttttgaagtgaaagcaagtttatcaagaaggcaaagaaataaaagaatggctattccataggcagagcagccccttaaggtcttaaggaggattgatgacaaacttcctccgcacccttcttaaggtgctgagctctgggcacaggtggagcaagataatcacctggaaataacaattctgtccactagagggaaacccagtctagagagatggggagggaaacccaggctagagagatggggagggaaacccaggctagatgcgtgggagccctgaggctggaggaaacagaaggagctgacggccccaggagccagtggacccagtgatctaggttcagtgctgtgctggaactggcttgtatcagcttagtgagaattgactcttgcattttcaggaatcttgagagctggttggtaaacttggtcattaaatattaaattatagctgggcacggtggctcacacctgtaatcccagcaatttgggacgcccaggtgggagaatcgcttaagcccagtgcgagaccatcctaagcaacatagggagacccttgtctctacaaaaaaatcaaaaaattagccaggcatggtggtgtgcacctctagtcccggctactcagaaggctgagatgggagcatcacttgagtctgaaaggtccacgctgcagtgagctatgattgcaccactgcactctagcctgggagacagagcaagaccatgtctcaaatttaaaaaagagagagaaaaaaaaaaaaaaaggccaggcatggtggctcacgcctgtaatcccagcactttgggaggccaaggcgggcggatcacgaggtcgggagattgagaccatcctggcttacgcggtgaaaccccatctctactaaaaatgtaaaaagttagccgagtgtggtggcaggcgcctgtagtcccagctactcgggaggctgaggcaggagaatggtgtgaacctgggaggcggaggttgcagtgagctgagatcatgccactgcactccagcctgggcaacagagcaagactccgtctcaaaaaaaaataaataaaaaataaaattaaaattaaaaaataaaaattataatgtgtcatggaattagggcacaaaattaataaagtaaaaattaaactatataaatttacatttaaataaactatattggctgggcatggtggctcacacatataatctcagcactttgggaggtcaaggtgggcagatgacttgagcccaggagtttgagacccacctgggcaacagggtgaaaccccatctctacaaaaaatacaaaaatcagctgggcatagtggtgagcgcctgtagtcccagctacttgggaagctgaggtggaaggatcactttagcttgagagatcgaggctgcggtgagctgtgattgcgccactgcgctccagcctagtgatggaatgagcccttgtctcaaaaataaataaataaaataaaaatcaatccctaattattttattatgttttactattatctgcctatcatatcagttatggtgaaagtactatgtagtggtttgctactgtccaacttcaactttgattttttgttttgttttgttttgttttgttttgttttgagatggagtttcattcttgttgcccaggctggagtgcaatggcgcgatcttggctcactgcaacctgtgcttcctgggttcaagtgattctcctgcctcagcctcccaagtagctgggattacaggtgcctgctgccacacctggctaattttgtatttttttagtagagacgaggtttcaccatgttggccaggctggtctcagactcctgagctcaagtgatccacccgcctcagcctcccaaagtgcttggattacgggcgtgagccactgtgcccggcccaacttcaactttggtagcttgcagttggtcatggcagattatttacttcatggaaacccacaaatgctacaaatcagggttccccacctcctgccgcccaccttccagtttgttaaacatttgccaggctatcgctgcttaggcatccccacatcaggtgttatggggaggacatggaattttccagaggtcttgctgacacagacacactcagagatatccctgtggagggagcaccccatttcagctggtagaagttgttgggggcatcatgggagcattgttgtgttgttgcaggaacgtgacctggaagttcccaccctgactccagctttgcgcaactgttccatccaccggaaattggtctatacttaagtgctcaggcatccctttctgtctgcctagcaacgaagtaaggttggtgatcatccagtgctagaacgatcatcccccatcagaaaggaagctttatgaagggcagggaagcccccacctcggttcatatcctcaggcctggctcaagtccctgggcctaagtattggagccgccacacagaaaacccaggaacaagcaagacactggagttaggcacatctaggctgcgccacccctaactgtgtgacctgagaaaggcacctaaaccaaactggtcttgtctcctaacctgtcaaatagggagattcctgcttatcatgcctgaccgtggtgaagattaaataggatcatccatgcaaaactctcagctgggcgtttccatcacctagaaggtgttccatgatgtcaaagctattattgttttcatacttgggatggggagtgccgaattcaaatcggttctgagtgcgggtctactctgacaccctgtgtgtcagaaggaggggcgggactaggaggcaacaaatccattacagcacagttggcagatgtgtccagtcacacagccgggaagtggaccagggactggacagcagccctccgcccaggactcggccagatgttccaagcctagcaaggggcgcttctacccccacccatcctccccgacaacctaggcctgtggcttggaggaggcagaggtgggggtcggcagccggacgtcgcaggccccaggctgcgcgcaggaagcggctccaaggttgtcctagagcctcaaagcggcggaagggagggagcagccggcacctgcattgtgcgagccccgctccccgctgagcttctgtgacctctggctcgcgctcttggcatccgctgctggggcagggcccgcggctttcagacaggtattaaccgggcagaggatactagatctgcgctggctttcattcattcacgcatccactcattcgtgcatccatcagttatcgagctgcggcaggagttagtgcacaaaaacatagtccatgatcgcagggaccatactcctgctaaatcatggaggtttggggagttccttcagactctcagtaaacttattcgtggaggtctgatttttttttttttttttttttttgagactgagtcttactctgtcgcccaggctggagtgcagtgccgtgatttcatttcactgcaacctctaccgcccaggttcaagcgattcttgtgcctcagccttcggagtagcctagctaatttttgtatttttagtagagatggggtttcgctatgttggccaggctggtctcaaactcctgacctcagatgatccgctcgcctcagcctcccaaagtgctggagttggttacaggcatgagccactgcgcctggactgattgtcaacatttaaaagttatgaaatttcatttaaaactcagattttggcttcttttgaagggattgaagatctgagatgcttgtgttatataagttgctgatgagtgtcatgctagagagggccgggtgcggtggttcacgcctgtaatcccagcactttgagaggccaaggtgggcaaatcacctgaggtcaggagttcgagaccagcctgaccaatatggtgaaaacccgtctccactaaaaatacaaaaattagctgggagtggtggtgcacacctgtaatcccagctactcgggaggctgaggcaggggaattgcttgaagtcgggaggcagatgttgcagtgagctgagatcaccccactgcactccagcctggacaacaaagtgagactccgtctcaaaaaaaaaaaaaaaaagagtgttatgctgggggcaaggggctttttaaaataatgtaatacattattttaaatattatttgtagcctcttgcaaagtggtgttagttgtacaataaaaaactcttagacaatttccctgttacaagggtctgaaaagcaagtttattttgaaaggcggatattttatttagttgtgatttttttaaatttaattttatttttgagacagggtctcattcattaattttatttttgagacagggtcacccaggctggagtgcagtggtgtgatctcagctcactgaaacctccgcttcccgggctcaggcaatcctcccatctcagcctcctgagtagttgggaccacaagcacacaccactacgcctggctaattttttgtattttggtagagacagggtttcaccatgttgcccaggcgggtctcaaactcctgaactcaagtgatctgccctcctcggcctctcaaagtgttgtgattacatgtgtgagccacccagcccagccttatttagttatgattcttgattgcctgatttttaaaatgttgctttctggaaataatctccttctccttctccttcttaacaaggtcttgctctgttgcccaggctggagtgcagctgtgccatcatagctcactacagcctcaaactccctggctaactgatcatcccacctcaacctcctgaacagctggaactacggggatctactacgttacccaggctggtcttgaacttctgggctcaagcaatcttcccacctcagcctctcaaattgctgggattacaggcgtgagccaccacacctggctctgagacatctaatgaaagatttctcaaacatgtcagaatgagctggttatgccatctgagtcccctgaaccaaggaaaagatttgtaggcctttaggtttgcataactggaggttagagggcagaagttagtaactgggtggaagaagtgtttatctcacctgaaagtagagtggagatggagagaaggggcagacaggggacaggtatttagaaggaagaactgataggatgtggggtctggaggagagagaggagacaaggttgactcttgggtttctggcctgggagaatgggtggaaggaggagccattcactgaactgaggatccagaggaggagaatgggcttgcttttagctatgtggggtctgcaagtctgggtcagcaatgaggagatcagtggaatattggggctctggtgctcaggagaggaagctgggcttaagattcaccattggtaagacagaggctctggggagtggtaaaatcaccctcactgagctgtctgcaaagagccagaggcctaggatgcacagtgaggatccatttgtatttaagggattaaagatgtgtggccaggtgcggtgcctcagggctgtaatctcagcactttgggaggctgaggtgggtggatcacctgcagtcaggagttcaacaccagcctggccaacatggtgaaactccagcctaggcaatgagagcgaaactctgtctcaaaaaaaaaagaggttatggggtctgggcacagtggctcatgcctgtaattgcaacactttgggagccaaggtgggtggatggcttgagtccaggagttcaagaccagcctgggcaacatggtgaaattctgtctctacaaaaaatacaaactaaattagctgggagtgctggcacacgcctgtagtcccagctactcaggaggctgaggtgggaagatcacctgagcccaggcggatcacctgagctgaggctgcagtgagctgtgatggtaccactgcactccagcttaggtcacagtgaggccctgtctccaaaaaaaaaaaaaagtttttaaggaattggaagaaagttaaaggaggaggagaggagcccaaaagactgcaggtccagctgccccacaggtggccttagcctccatcctgctgggctggacctattcccaaaaccttactacagaggcagactgaggaacagttgggaaggagggattctgaccagagcctgctgtcatcagataaagtgtgaggtgggacaagattctaggcaagttcaggatacctaagtgcccttcagcagctccctcctgctctccagggccacttagtgggcctctgggacactgctgagaagggaagctgagaagaaggccccaactgggccccactggttagagagtgagcaaacaggacacccaggacattcttctcagctgtggggaagttgggaggccagatgtacccagggctgccatactagctcctcagactgcccccagtgagacatcaggctggctgcaggccagggtagtgagctccactccttgtggccatgacgcatggagatc

SEQ ID NO: 591 - DNA, 415 bp, Homo Sapiens
ttttgagatggagtctcgctctgttgcccaggctggaatgcagtggtgcgatctcggctcactgcaacctcctcttcctgggttcaggcaattctcctgcttcagcctcccaagtagctgggactacaggcgcatgcaccacgccgggctaatttttgtatttttagtagagactgggtttcaccgtgttagccaggatggtctcaatctcctgacctcgtgatccgcccgcctcagcctcccaaagtgctggggttacaggcgtgacactcgtgcccggctgagaacattttacatatatgcgaaatagctacccagtcctgatcgactagagcactgagtgacacacattaaatgttaagtttgaaaagactgtaaaacattcacatatgacagctcttagtgaagtaagagc

SEQ ID NO: 592 - DNA, 3310 bp, Homo Sapiens
gagctcctgggctcaagtgatccaccagactcggcctcccaaaatgccgggattacaggtgtgagccactgtgcctggcctagatgctttcatacaggcttttcaattatgcattttccttaagtaggaagtcttaagatccaagttatatcggattgttgtagtctacgttcccatattctattcctatttctgagccttcagtcatgagctaccatattaaagaactaattctgggccttgttacatggctggattggttggacaagtgccagctctgatcctgggactgtggcatgtgatgacatacaccccctctccacattctgcatgtctctaggggggaagggggaagctcggtatagaacctttattgtattttctgattgcctcacttcttatattgcccccatgcccttctttgttcctcaagtaaccagagacagtgcttcccagaaccaaccctacaagaaacaaagggctaaacaaagccaaatgggaagcaggatcatggtttgaactctttctggccagagaacaatacctgctatggactagatactgggagagggaaaggaaaagtagggtgaattatggaaggaagctggcaggctcagcgtttctgtcttggcatgaccagtctctcttcattctcttcctagatgtagggcttggtaccagagcccctgaggctttctgcatgaatataaataaatgaaactgagtgatgcttccatttcaggttcttgggggtagccaaaatgaggttctttgtccctctgttcctggtgggcatcctgttccctgccatcctggccaagcaattcacaaaatgtgagctgtcccagctgctgaaagacatagatggttatggaggcatcgctttgcctgaatgtgagttccctgcctctgtgtttcatccattcctcatacgcttctctcctccatcccctctttcttccacttcgcccctccacttttacttaattatctaatcatcctcttttctgctcatttgcatactcttttatttcatgtatgtatatatgtatgtatttatttatttttgaggtggagtttcgctcttgttgcccagactggagtgcaatggtgtaatctcggctcactgcaacctccgcctcctcggttcaagtgattctcctgcctcagcctcccaagtagctggaattacaggcacccaccaccatgcctggctaattttgtattttttgtagagacagggtttcaccatgttggccaggctggtctcaaacttctgacctcaggtgatccgccctcctcagcctcccaaagtgttgggattacaagcgtgagccatcatgcctggccccatttattttcctatcctttctttctcttattgtctgatttttttttggaattctccatctcatcaagaaactctgagctttgccatctttggagattggctggaaagcatttttgtctgagaattacagttcctcctttatgcagatcctgtacatctctgtggtatctctttctcatctttccctcagtgatctgtaccatgtttcacaccagtggttatgacacacaagccatagttgaaaacaatgaaagcacggaatatggactcttccagatcagtaataagctttggtgcaagagcagccaggtccctcagtcaaggaacatctgtgacatctcctgtgacagtgagtagcccctataaccctctttctctgtttttctgaggcctgcccttgggataatctcctttttagtgccaagcagacctcaggcttcattgccttggctgggctctataaaaattgtgggacttgaattggcagtactgagtaagaagctgtttggatttttcatggtcatcaaatccccagacagttccttgaggttcagtggtagacaatcggagctgtctgagagtcttggaatctgattgtctgcattttcagggtaagtcagttgatgaagctgatgattcctccagagatatcccagggaaatgaaggaagtccctacccagggttagacattaccacattggtcctttcatatagaaagacaacaggcacaagccttgagtttagagaacccactggatccaggggttaggggaactcagtgcctttctgggtaatacttgtcagctgtctcaatcctttccctgtaactcctgccagagttcctggatgatgacattactgatgacataatgtgtgccaagaagatcctggatattaaaggaattgactactggtgaatccttattctattttctatttccccatcctccttctccttaccccattagcccagcacccctttcctcttaccctatctcttggtcatttaatctagaatacagtgtctgaaacaaagcttacctagagactcaggtttctgttattaagcctctctcgctccgctccttggtagcaattttcctaataaggggttgcctaatggagggctcagacccaggcctcctttcacttagacttggacatctaattccacttgtttagttctatgccctaaagcaagctgttggtaacattgcatctcttttttaaccctacaattttcttggatattttttatggactgtattccacttgatggcttgtgtcgcttgacatcaggccaggaatgtctttctgtaattctcgtccacgctcttccacttcagccctcctgggaatgaatgtaaagattcagtcagctaactcaccttgtcccccttctccattatcaggttggcccataaagccctctgcactgagaagctggaacagtggctttgtgagaagttgtgagtgtctgctgtccttggcacccctgcccactccacactcctggaatacctcttccctaatgccacctcagtttgtttctttctgttcccccaaagcttatctgtctctgagccttgggccctgtagtgacatcaccgaattcttgaagactattttccagggatgcctgagtggtgcactgagctctagacccttactcagtgccttcgatggcactttcactacagcacagatttcacctctgtcttgaataaaggtcccactttgaagtcactggctgtaatttttttccccctggagggaaggggaagaaataggatgagtaggtggacactgaagccataggtcatagccaccttccatctctactgaagaagaagtaggctgaatttacaatagaaaggtgaaggttactgtctgtaccaactcaatgcaacaaacttttattgatcacctaatctattcaaggaactgtagacggatcc

SEQ ID NO: 593 - DNA, 341 bp, Homo Sapiens
ggcacgaggtgcaccacgggagcgccgcaccggccggcatggaggagcgcggcgattccgagccgacccccggctgcagcggcctgggtccgggcggtgttcgcggctttggcgacggcggtggagctccttcgtgggcccctgaggacgcctggatgggcactcaccctaagtatctagaaatgatggaattagatataggagatgccacccaagtttatgtagcggtcttggtttacctggacctcatggaaagcaaaagctggcatgaagtaaactgtgtaggattaccagaactccagctcatctgccttgttggtactgagatagaaggggagggg

SEQ ID NO: 594 - DNA, 441 bp, Homo Sapiens
  misc_feature (317)..(317): n is a, c, g, or t
  misc_feature (358)..(358): n is a, c, g, or t
  misc_feature (396)..(396): n is a, c, g, or t
  misc_feature (409)..(409): n is a, c, g, or t
  misc_feature (419)..(419): n is a, c, g, or t
  misc_feature (430)..(430): n is a, c, g, or t
cggcacgaggattgaaaattatcaaagtaaaatgatagggtattttgtttcatgacatcagctgctgctttttgatgtggtgctgctccccgccagtgccgtgaattctccgcctttgccgggtggtgcacgcgacttagactctgctggtgcatgccgaggagtcaggagcccagctgggtaacttttctaatggtcaaaatgttgttccctcctccaccttcctgaagcaaccatgatttgactaaagctctttattactccacctgaatatcagacagtcatgctgcttgcaatttatttattgttttccagangtaaactactgagattttccccacctgtttttaatgtgctnctcgttcataagtattctgatctgttagtaatatctgnaaatatcactttnaacacgcttngggtgcactanttggctgaagc

SEQ ID NO: 595 - DNA, 700 bp, Homo Sapiens
  misc_feature (616)..(616): n is a, c, g, or t
  misc_feature (676)..(676): n is a, c, g, or t
  misc_feature (683)..(683): n is a, c, g, or t
  misc_feature (690)..(690): n is a, c, g, or t
  misc_feature (693)..(693): n is a, c, g, or t
  misc_feature (695)..(695): n is a, c, g, or t
gcacacgcactgggacgccccgtttcctacctaagagctgctgcccatctccctccaggtggatggacctcacgggcagctcgtgcctggtagtgtccagggccgtggcgaatgtcctgtattgctccttgaagcgtgtggccactgcctcgaaggggctgagcatctcgatctgggcatccaggacatctgccagctcccgcttcctctgagagaggagaagcctgcgcttcagctcgtgggcctttttctgtagcttctccttctccttacacattattaataaattcttttctgcccttctttcaaactcagcaagattgttctccatctttacggatagtagcgtcagcagtagtgtctgagactccatcatttccattgcttcagataaatccgggctctttttccgaggggcagaaaatgatgttgactcaggtttctttgatattgtttttgctaactgtggcgtctttttgacgatgcttttgacattaatagcagagagatccaggtcaggtggagctgtgccatgcccttccatgcaacgtggactgcaggtcaccctttctgaccccactgctatctgctggtaagaaaagaatccccgaaaggnaagcacagtcaaagagacactcttcattcaaagccagggaaaccaagcccgggtttttgnacaatancacttgnttntnaaaag

SEQ ID NO: 596 - DNA, 213 bp, Homo Sapiens
ttttttttttttttttttggaaaaagtcaaaagtgttttgtctcgttttaatatctcatcagctttacagggttacaatcgtcttaaatatttctgaagtttaaatacaatctgcataataatgttactataaaatgtaaactttcagggttcttttaaatttcaaaatcacacttttttttttggcctttttgcctttttttttttccttta

SEQ ID NO: 597 - DNA, 3318 bp, Homo Sapiens
ggcacgaggcggcagtctcttcgcggcgtccaccacttagacgcaagttgctgaagccggccggggagaaggtgttgttgccggagctgagaccgggcggccacagtccgcagggatgaacctcgagttgctggagtcctttgggcagaactatccagaggaagctgatggaactttggattgtatcagcatggctttgacttgcacctttaacaggtggggcacactgcttgcagttggctgtaatgatggccgaattgtcatctgggatttcttgacaagaggcattgctaaaataattagtgcacacatccatccagtgtgttctttatgctggagccgagatggtcataaactcgtgagtgcttccactgataacatagtgtcacagtgggatgttctttcaggcgactgtgaccagaggtttcgattcccttcacccatcttaaaagtccaatatcatccacgagatcagaacaaggttctcgtgtgtcccatgaaatctgctcctgtcatgttgaccctttcagattccaaacatgttgttctgccggtggacgatgactccgatttgaacgttgtggcatcttttgataggcgaggggaatatatttatacgggaaacgcaaaaggcaagattttggtcctaaaaacagattctcaggatcttgttgcttccttcagagtgacaactggaacaagcaataccacagccattaagtcaattgagtttgcccggaaggggagttgctttttaattaacacggcagatcgaataatcagagtttatgatggcagagaaatcttaacatgtggaagagatggagagcctgaacctatgcaggaattgcaggatttggtgaataggaccccatggaagaaatgttgtttctctggggatggggaatacatcgtggcaggttctgcccggcagcatgccctgtacatctgggagaagagcattggcaacctggtgaagattctccatgggacgagaggagaactcctcttggatgtagcttggcatcctgttcgacccatcatagcatccatttccagtggagtggtatctatctgggcacagaatcaagtagaaaactggagtgcatttgcaccagacttcaaagaattggatgaaaatgtagaatacgaagaaagggaatcagggtttgatattgaagatgaagataagagtgagcctgagcagacaggggctgatgctgcagaagatgaggaagtggatgtcaccagcgtggaccctattgctgccttctgtagcagtgatgaagagctggaagattcaaaggctctattgtatttacccattgcccctgaggtagaagacccagaagaaaatccttacggccccccaccggatgcagtccaaacctccttgatggatgaaggggctagttcagagaagaagaggcagtcctcagcagatgggtcccagccacctaagaagaaacccaaaacaaccaatatagaacttcaaggagtaccaaatgatgaagtccatccactactgggtgtgaagggggatggcaaatccaagaagaagcaagcaggccggcctaaaggatcaaaaggtaaagagaaagattctccatttaaaccgaaactctacaaaggggacagaggtttacctctggaaggatcagcgaagggtaaagtgcaggcggaactcagccagcccttgacagcaggaggagcaatctcagaactgttatgaagaccttcgaagttcttcattctttctcactttgccatcatgtggcctctggacactgtggtcagtcatttgaaaattgactttaatttaaaacaaaggcctgtgctccacccaggaggtgggaggtgaattttatgtttaaatgaagaagtgaattatggaagaaggtatacgaccttcccttccttttcaagcataagtccaaatagactctcaggaatgaagatttgtgaagacatcagataggaattttggactcatttaaactttgatgcttagttatgttgctggagaaaagatacttatgttttgctcatctaacttcattgtacccagcgtcattttgacatgtcatttcctatctcccatttgccttcggtcctcaatgcatgtctttgagtgacttcttatctgaaattttgctactggtatcctaggaaagcttttgttggatactctcattttaaacttctcctctccccagatacctcctatatttccatattgtgtgcaaaggatgggcagaaaagaaagtgcttgaaagatttcaaattttcagaaagggaacaacgaaggccctctcttcctctcataccacgttttgctcaagaagctgggctgtaacaattcagggttttcccttgttttcctctcattgcatgtttccctccaatattggttcattgtcatcaatcatggtttttgaagatagctagttttatccatctccagcaaagaatcatcaatagtttatattgctttacctgtgctggcttccagagatggaaacaaacccaggtgtctctcaacaagctacttttttactggggtgggggaatctatgcaaggagtaaagtaaaaccatccagaatcaaagcagcaaccacatagttcaaatcaaagatcaaggtgaattttttgtatcactgcctgtggaaatctatcctcatcagtcattgcatttttccctgcctatacctgtgctcctttttcttactgtgttttcagtcacttcctttctgtgaaaggttgcttagctttttttttgacatttgttgttctttatataaaaataacagattggatagatgtgtacatttggtgtttgaaattctctgaaaatcccattaggaaaccaggtgtgaaaagggctcagtagcttctctgagtggcgtttttagctgactggaagtgcttaatctggatcgtcttttttttttttttttttttcaatattttaaaaggagaatttaaatactgtgcttactgtgaaatatatcagttggtgagccgggcgtggtgggtcacgcctgtaatcccagcactttgggaggccaaggcgggtggatcacccgaggtcaggagttcaagaccagcctggccaacgtggtgaaagcctgtatctattaaaagacaaaaattagctgggcgtggtggtacatgcctgtaatcccagctacactggaggctgagtcaggagaatcacttgaacgtgggaggcagaggttgcagtgagtggagatcgcaccactgccctccagcctaggtgacagaatgagactctatctcaaaaaaaaaaaaaaaaa

SEQ ID NO: 598 - DNA, 401 bp, Homo Sapiens
  misc_feature (359)..(359): n is a, c, g, or t
  misc_feature (374)..(374): n is a, c, g, or t
gaaggagtaagggcagagaaggtgacaatacctgggtaagtctaaaaatgctgactataataagttctcagagagactagatagatagacatagatataaagccactcttattaggggtatgactaacatgtaaaaagctgcacatacatgtatacacttgatgagtttaggagtaagtttacagccatgaatccatcaccaccatgaaggccacagaaatatccatcaccacccaaagtttcctccaatcccccctatatatgtcctcaaattcctggggctcaagcgagcctcccacctcaggactcctgaggtaggctagggactacaggtggcacggccattcatggcccaactnattttttctttattnttatttttgtaggaggtgagggtctca

SEQ ID NO: 599 - DNA, 407 bp, Homo Sapiens
acatcaaagttgggtatttcaatgtgccaagtttgggtgaactaggttcggtttgcctctttcataacaatgtaaacacaatggtgtagttaattaaattctgggtggataggagcaggactgattactatgtcttgcccttcgccctttgtttttttcagaaccaaataacagaaatgtgtatgtgtgtactgtatctgcctttccaccacatttttatgacactgtattccactgcctgcttttgtaccttctttccctaggatttgtcctacagcttagtattgtggttgacagcgatactagggctgacagcacagaagtcataagagaagagtggaagggcaagaattcaaagcatttgttcatacaatgtggcaacctcttttgcatagttgcgtaggatc

SEQ ID NO: 600 - DNA, 439 bp, Homo Sapiens
tttttttttttttttctaagtttatatagttttatttccacaatacccagtgcctgactctttgggtgactttactaatattttgtattgcctttatcacaggtttgctatcacccctatgtttgagaggaagaataattttaaaatttatgtatttgttaactaaatttacaaaatatacctgatgttaattttaaatgatctttaaaattaaacatactattaattattacataaaacataagtttataggagatcaacaaaaaattactaggtttgaggttttaaggttcatctgaatgagggaggagtttccatctcattgttgtatcaatttcttcatcaaaatttcctacttcctgttctttagaaagctctaagaataccttctccagtgtgcactgaaaaaggctgtattcttccaggttaaagttatgct

SEQ ID NO: 601 - DNA, 379 bp, Homo Sapiens
atcacgcaggagaacgtcccgcggtggtgactgagccggccggatccgcgccaggtatccttcggcccgcggaatatctcggaaataggacaagtcctgagtccggagctcctcctgcgaacttccaggaataggtgatctcctcctttggcagctggaagtttacgatgcaagaaaacatagcctggtcgccccgagtcactgtcacatcctgggcagtccagcgggaggtcgcagccttatgagtagcacccgctgcagaggaaacgccgggcgaactcctggagaccgcaggatgggatgcaagcctgggctgtggaggaagaggaaacatcactaccttacagtcatgggaagacccttgctcgatgcctcgtgc

SEQ ID NO: 602 - DNA, 473 bp, Homo Sapiens
ttttttttttaaaatggtgagaaaagctttattcaagagagtggtgagaggagctcacctccgagttcaacaaccacagctggagattgatggcgttggaggggtcagcggatgggaagttgttagggcggccttcgagggtagggggattctcactggagtggctcaatgaggatcttgcaggaggccggcagtgtgatgagatcaagggtgggagatgaggaatgggatcagatatcgagggtgggtaattctccataaactgatttagaggattcttgctaacaccggggtcggcgggcccagcgaggatggggatggggtcaggcctcgtcgaggaaaggactcaggggcacctgcctagagttcggccacagagtgtgtcaggctctgggagaggggcctcacggagagttggagcaggcacggaaccgccaacacccaggccgccaacgcaacttcccatgcatggg

SEQ ID NO: 603 - DNA, 330 bp, Homo Sapiens
tttttttttttttttttttttttttttttttttacaaagtaaaatcattctttaattattaaaaaaaaatcactgttgggcttttttttttaaaggtccataaattttcaatgcaatgttgaactggggaaatggttatagcagctctcacataagttatttgaattaataaacattatcacagtattaagaaggcaaggtaaacaaatagcttaagtattttatttgtttgcaactaagcttgttaacactatataatgaaaatgtacaaagaataatgttgcagtttttggttagatttaagtcaaagacattcattaataaggaatc

SEQ ID NO: 604 - DNA, 414 bp, Homo Sapiens
gagctgaggcaggaggatcgcttgtgcctgggaggttgaagctacagtgagctatggtcaagctactgcactccattataggcaaccctgtctcaaaaaagcaaaacaaaatgaaacattttccccttgattatagagggttgagaaaaatttgagggaagattcagaaaattacctgtaactgaacagaatgccaccagcttgggcttattctgcatgcataattatgaacattttcccagctcttgtgaaaattctcacattcatagaaagatagatgcaccagtaaaataaatacctgtaaatacgataataatttcacaatatatgcttcacctagatttaccagttactaatattttgccacagttttattttctcacacacttttgttgagcatctgaaaaccataca

SEQ ID NO: 605 - DNA, 364 bp, Homo Sapiens
tttttttttttttttttttcttgtgacatgttttttgctttattgaaattctctcttacaaaaggtctgatgtattttaggccaggcctattttgctttggtccctgaaatgcaggcccatggtcatttccatgtcctctgaagtaggtatgtaaactagtagacttccatttttaaggttcacacactttttaacattgtttttatttgatgtaaaacaagacttatgttgtccctaatggaaagaccaagtaagagagttatgtgcttcttcagtgaatgggaaaactgggattccttgccagaaccgggttgggaatttagtttgttcaatgtggcatctttcacccttagtttttttttt

SEQ ID NO: 606 - DNA, 415 bp, Homo Sapiens
attgtagagatgctatggcgccaaggctggacccagctcctggctgcaagcaatcttcctgcctcaacctcccaaggtgcttagattacaggcatgtgccaccacgctcagccttttttttctgctttaaagggatacctgccatttaaaaaatattgcaaataaaaatcccagtaagttaaagccagaaattaatacataaacagtcataaaagaaagtcttaaagagactaaattcatgtaaacttacagagccaagatagagtatttaaaaaaaaaacttaaatccaggttaggcaatagctacttaagacctccacttacattactttccactataaacagcaacaaggacaaacccataaatactatgtgtatatgctaaaactttcaaaattatcattgcaccaccttt

SEQ ID NO: 607 - DNA, 4098 bp, Homo Sapiens
atgctgcaaatgccgaagttaaatgaaatacctccggggagggcaggccgcagggaggctcggggggagggaagatggcctggacaaacaggtcctgaagctgcgaggctggagtggagggcgcaggggcaggcgggcggcgccagagctccatgggacagctggggaagctccaggctacctacacaacctggcccaggctggtcacggtgtcccccctccctgctctgtgccctctccttccagaaatccaccatggagagtaaggatgaggtcagcgacaccgacagtggcatcatcctgcagtctggccccgacagcccggtctccccaatgaaggagctgacccatgcagtgcacaagcagcagagggccctggaagcgaggctggaggcctgcctggaggagctgaggagactctgccttcgggaagcggagctgacgggcaccttgccagcggagtatcccctcaaaccaggggaaaaggcccccaaggttcgccgcaggatcggagcggcttacaaactggatgactgggccttgcacagagaggaccccctaagcagcctggagcgccagctggccctgcagctgcagatcacagaggcagcccgtcggctgtgcctggaggagaacctcagcaggcaggctcggcggcagcggaagcactccatgctgcaggaggagaagaagctgcaggagctccagcgctgcctggtcgagcggcggcgcaatagcgagccacctccggctgctgctctccccctgggccgagagctcagtgcctctgatgacagctccctgtcagatgggctcctcctggaggaagaggaatcccaagtgccaaaacctcctccagagtctccagccccaccttctcggcctctcccaccccaaacccttgagggtctgcagccaacaggacctgaggctgggagcccagaacgggctccagtccagaacagcccctggaaggaaaccagcctggaccacccctatgagaagcccaggaagtcttctgagccctggagcgagtccagcagcccagccaccacaccacaggatgggcccagtgcctccagcctgtggcttctggagcctgcctcctaccacgtggttcccatccgtggtgttcctggccagtggcagggccgcaccagtgccccagccacccctgagatacaggggaggaggggccagtcgcagtctctgagggtggattccttccgggcgggtcctgagggccgaggtcgcagcgcctttccccgccgccgccccactcactacacggtgacagtgccagattcctgctttcccgcgaccaagcccccgctgccccacgccgcctgccactcctgctcagaagacagtggctctgacgtctccagcatctcccaccccacttcgccgggcagcagcagccccgacatctcctttctgcagcctctctcccctcccaagacccatcgtcaccgcggggcctgggtcccagccggcagcagagagctggtcgcccaccaccccaagctactgctgccgcctggctatttcccggcggggcggtacgtggtggtggctgagagccccctgccgcctggcgagtgggagctgtgccgcgcagccccgggccctgcttacgaggaggagggcactcccctgcgctaccagcgtctggtgccctcccgcagccgcatcgtgcggacgccctccctgaaggacagcccggcaggccgggggctcagcaaggccgccgtgtccgaggagctcaagtggtggcacgagcgtgcacgcctccggagcacccgaccccactcactggaccgccaaggagctttccgggtcaggagcctgccccttgggagagagggcttcggacgagccctgggaccccgggcacaggtgcccacagtttgtgtgctgtggagatcgcctgatggggcccctgtgcaagtctttgtacctgaaaaaggagagatcatcagccaggtgtaactctgcgccccacgctggaaaaaactgtttcatagaggggctgggctgagacccccccacccctgagtgcctctttcagctcccccatccccatcgcaggccgatgacctggagctaagaccttttattattttttttttacacgacttttttcagaagccctgacctaaggatttatatatgtggattgtcctcaatacccctgtgatatgattatgttttatcccccagagtttggcctactggacttaaggccttgcctgtctgactgacagcctctatctccttatataagacaagtggcaggggacgagtgaagcagagtgagccaccttgggagttctccaacgctctgtgctctggttctaagaaattccctggggaactgcccctggccctcctgtcccactattgctggaggctggacatggtacatactcatgcacatgactctcccccatttcccaggtctctgggtaccccagcctgggctgggggagaatctcttcccccttttctaatgtgctctgtgatgcacacaccaagtggtaggtcaaaggtcagtatatcccggtggtgtattgtcttgctagaccctgctattttcctgaccccctaaatcctctttagggacccagtcactataccctgtctatgccctgtgggctcccagacccctgagctttgagtcagtggcatcacagtttgtagcctcagggggtctggctgggggctggtccatgcttgtggttagtggacagcagccaccctttgacagctacctctggacatctcaagggcttgcagccccactgctccttctaacattttgtttgtttttgagatggagtctcgctctgtcgcccaggctggaatgctgtagcaagatttcggctcactgcaacccccgtctcccgggttcaagcgaatctcctgcctcagccttctgagtagctgggattacaggcaagcaccaccatgcctgctaattttttatttttagtagagatggggtttcatcatgttggccaggctggtctcgaactcctgacctcaagtgatccacctgccttggcctttcaaagtgctgggattacaggcatgagccaccgcacctggcccttctaacgttttttcatcatagtcccaaaaaccaatactttacaagtggtttttgaaaggcaccacttttgtggcatgttctggttgggagagggagtcacagttcctactccccccaccagctatgcttctgctctgagaaggtggttatttatacaaacatggacatactcactcccaagggctgatgagatgctgaattttctttgggggcattcattaattgtcccagctgcagcgactggagcaagtctggaagctgcctgtgctaagaccacccagctgtccctgggttctcatcctagggccttctttgcttccaggtcaggggacctgcttcaatgagaaagcaactgaattgaggctaggagaggtagggagagctgagttctgacttcacctgtgcagaactctctgcccccatgttacctggactggaacagactgtgaatatagcagaaggttccaagaactctggtgtctgacctagaagaggcacagttctctctactggaaagaaaacgatgtagccgattgcacaagggtgccaagggaagacccaggatggcccatcaaaggaacctgggggaggatgcaggaggctgaagggatgcacctggcatttctctcactgtgctcttaccgcatcagcaacccccaacttttgggcctactctgccccccatgcgtgaataccctgcttggatgctgtgcttttccggtttgtctctaagcccctttctccagggcatgttggtttccctggcctctcagtgtcctaactggagcccagagtgccttgttctgagccaggagacggctgagcactggccctccacacctaagcgtcctttacattaacttattggtcttgtataacacctggtgccattgccaagtggctgtgtcctcagctacagagctggaattgtgtggggtttagtgctaaatacttcaataaagtctgttttttgtgattggctg

SEQ ID NO: 608 - DNA, 594 bp, Homo Sapiens
cacgaggtgcacagcctctcttaaaacaacatgccacagttaaaacttacttcagtttggacaactactcacagctactacacagagacccgaacgagtcactgatatacacctggaccaccaccaatggatatacaaatggcaaacaattttactccgccctctgcaactcctcagggaaatgactgtgacctctatgcacatcacagcacggccaggatagtaatgcctctgcattacagcctcgtcttcatcattgggctcgtgggaaacttactagccttggtcgtcattgttcaaaacaggaaaaaaatcaactctaccaccctctattcaacaaatttggtgatttctgatatactttttaccaccgctttgcctacacgaatagcctactatgcaatgggctttgactggagaatcggagatgccttgtgtaggataactgcgctagtgttttacatcaacgcatatgcaggtgtgaactttatgacctgcctgagtattgaccgcttcattgctgtggtgcaccctctacgctacaacaagataaaaaggattgaacatgcaaatgcgtgtgcatatttgtctgga

SEQ ID NO: 609 - DNA, 553 bp, Homo Sapiens
  misc_feature (142)..(142): n is a, c, g, or t
atagaggatcccccgctgcggcttacacttttgaatcaatctttgagccatgcatgattttgtaacatcacgtactggtcactggaaaaatggttcattgaattcttccaaatgaaatgcatttcattatacaaatcacatntgttaatatccccaacaataaagctcatggtggagtacagattttcggaaattccaatttttgcttgaaagctttatcactggcaacactatcagttgtttcccttgaggtgagaggctcattccattaatttccagaaaatatcagccaaatattcaagtctaaataccgtaatctgctagttctttcaattctaaagggcatgccttgaacacagccaattcagcttgcaactcaactgtgtaactgcttttcctcaaggcacccatacttcagtgcacagcagaggggctttatgcatgcttccagttttctcagaatattataaattctcaaggtcaactttttttttctttttgagacagggtttcactcttgttgcctgggctggagtgcaatggtatgatctcg

SEQ ID NO: 610 - DNA, 684 bp, Homo Sapiens
ttaggaaaaacctctgccgagtgagcctctggttgggaatatgtatgatgaaaaaaaaactggacaaggcgttagtcaagcaaagctgaaggcatgaggaaagtggatatctggctggagtctaggaggatttaatgcaaactaagatactctgagggcagcgtggcaaaaaagagactacaattcccggtggtcacagcgtttgagaagcgatgctttctgagacttgtagtaactaggagctgtgtttgaactatccaggctcaggacagcctctgtgaagaaaaaattttgtattaataaagcggatttgagtgggatctttatcctaatcgattacgggcccacacgtatgggaagaattctaacaatgattaaagggacatgctacctttacgactatccttttctaatcgatgactcctaaatctaggagtaggtagtcgatgtttgtggtctgggcgtctgtacgaagggcaacctcgtgctttctgcagaggagaccggagggcacgaaggcagagtccaggcttagactgcagttcctcgcttacctgtgcagtctaattttgagctgcctcttgtgtagtcttaaaaggcaggagcttcgtgttgtgggtctgctaacccgtaacgtttccgtgggcaagtccgtgtgtactcctcggcatggtcagtccaaac

SEQ ID NO: 611 - DNA, 401 bp, Homo Sapiens
  misc_feature (286)..(286): n is a, c, g, or t
gaagaactggcccagcggaggttcccgcttctgaagcgtgggaggcggaagagactgcagcccccgcccccgtccccaagcctccgccccttagcccccgcccccagctgccagtccccagcagctcagtcctgcagtgagagtcttgggagtccatagctaagcaccaggagctgagcactgcccgctgtgcctgcctgcaagtctgacatggctcaggagaaaatggagctggaccttgagcctgacacatcttatgggggaacctgaggagatccagcagcgntcccctaatccatgggctcagtgacctttcacaggttttccaaccttacacacttagaactcggaggaatagtacaacaattatgagccgtcacagcctgtttgctgttcattcc

SEQ ID NO: 612 - DNA, 1804 bp, Homo Sapiens
gcggtggtggacacgtcgagccgggtagaagtggaggggccgttcgaagagtcgtgagggggtgacgggttaagattcggagagagaggtgctagtggctggacttgacctggaaagaatcttctgctgactctcaacttttcctggaaaaaatggatcattcccaccatatggggatgagctatatggactccaacagtaccatgcaaccttctcaccatcacccaaccacttcagcctcacactcccatggtggaggagacagcagcatgatgatgatgcctatgaccttctactttggctttaagaatgtggaactactgttttccggtttggtgatcaatacagctggagaaatggctggagcttttgtggcagtgtttttactagcaatgttctatgaaggactcaagatagcccgagagagcctgctgcgtaagtcacaagtcagcattcgctacaattccatgcctgtcccaggaccaaatggaaccatccttatggagacacacaaaactgttgggcaacagatgctgagctttcctcacctcctgcaaacagtgctgcacatcatccaggtggtcataagctacttcctcatgctcatcttcatgacctacaacgggtacctctgcattgcagtagcagcaggggccggtacaggatacttcctcttcagctggaagaaggcagtggtagtggatatcacagagcattgccattgacatcaaactctatggcgtggccttatcgattgcagtgggaagttgttgaagacttgaagacgtgattcctgctccaatcatcccttcttgctcctctttgtgcacgtacacacacacacacacacacacacacacacacacacccctgctcaacagaggtttagtttacagtctctgaactaaagtagtaacctcccaaattgttttttctaataagctgagattcccatttctcttaaggagaagccacccatgagatgtcttttccttctccatcatcttagagccaagttatatgttcttgtctaatccatgtagctttttgttcaatgacttgatcatctgcttcctttttgaatttttaacagatagtaagtaaatttggtggttttttcccctgggtcagtgatggaaaggggttaacttcagccaggattgatggcagctgagggaaattcttgcccaactaaacccagaactcaaacttaacattagaaaataaggtccagggccggacacagtggcccatgcctgtaatcccagcactttggggggccaaggcaggctggatcacctgaggacaggagttcgagaccagtctggccaacatggggaaaccccgtctctactaaaaatacaaaaattagccgggcatggtggtgggcgcctgtaatcccagctactcagaaggctgaggcaggagaatcacttgaacctaggaggcggaggttgcagtgagccaagatggcgccattgcactccagcctgggtgacaagagtgaaactccatctcaaaaaaaaagaaaagaaggtccagcttttggattcaatgagtgggaaatacattgtgcctttctctagatgtgatacgttataccaaaatctttgtagtgtgcagagcggtggtttgagactaaatacaggcttagaacttgcagagtgtgtattcttggatggctgatgcatcgacttgcattcccacttaacactttgattagccatgaacttgccaatcaaaaaatgacaatcaatttgagaaaatagaaatagatatttttaaataaaaccattcacagttt

SEQ ID NO: 613 - DNA, 444 bp, Homo Sapiens
  misc_feature (402)..(402): n is a, c, g, or t
  misc_feature (435)..(435): n is a, c, g, or t
agtggcacgtcttcggacctaggctgcccctgccgtcatgtcgcaagggatcctttctccgccagcggcattgctgtccgatgacgatgtcgtagtttctcccatgtttgagtccacagctgcagatttggggtctgtggtacgcaagaacctgctatcagactgctctgtctgtctctacctccctagaggacaagcagcaggttccatctgaggacagtatggagaaggtgaaagtatacttgagggttaggccttgttaccttcagagttggaacgacaggaagatcagggttgtgtccgtattgagaatgtggagacccttgttctacaagcacccaaggactcgtttgccctgaagagcaatgaacggggaattggccaagccacacacaggttcanctttttcccagatttttgggccagaagtggganagcatcctt

SEQ ID NO: 614 - DNA, 299 bp, Homo Sapiens
  misc_feature (294)..(294): n is a, c, g, or t
tttttttttttttttttttttttaaagggaaacattctttggcactttaataacttttttaaggttcatacaaatttaacaataacaaacaggatactgaccccgacccgcccatgaaaaagaactcagatgaaagatccaaattccaaaaaaaatttaatatttgtctcaagcagaacgacatggtcagggttacccagtacactgaagcctgaaggtgatgaagttggtgctttgaaatgatcacggatcaagggttttttttccacctccaacttctccttttccttttgnaccta

SEQ ID NO: 615 - DNA, 664 bp, Homo Sapiens
tcttttccacagatatcagttgtaagcacagatgatgatctagcttgacttctgtgacaaatgttgacctttgaggtctaaacaaataatacccccgtcggaatggaaccgagccagcagctgaagtctctttttcttcctctcggctggaagaacatcaagatacctttgcgtggatcaagcttgtgtacttgaccgtttttatattacttttgtaaatattcttgtccacattctacttcagctttggatgtggttaccgagtatctgtaacccttgaatttctagacagtattgccacctctggccaaatatgcactttccctagaaagccatattccagcagtgaaacttgtgctatagtgtataccacctgtacatacattgtataggccatctgtaaatatcccagagaacaatcactattcttaagcactttgaaaatatttctatgtaaattattgtaaactttttcaatggttgggacaatggcaataggacaaaacgggttactaagatgaaattgccaaaaaaatttataaactaattttgtacgtatgaatgatatctttgacctcaatggaggtttgcaaagactgagtgttcaaactactgtacattttttttcaagtgctaaaaaattaaaccaagcagcttaaccatg

SEQ ID NO: 616 - DNA, 223 bp, Homo Sapiens
  misc_feature (24)..(24): n is a, c, g, or t
  misc_feature (33)..(35): n is a, c, g, or t
  misc_feature (68)..(69): n is a, c, g, or t
  misc_feature (194)..(194): n is a, c, g, or t
  misc_feature (199)..(199): n is a, c, g, or t
tggaatggtgtatttgtgcaaccntggggtgcnnnggatgggtgacttgtatctaagtgcatctgcgnntatacctgtgtgtgtctgtctgggatgatatgtttttgtggcagtctgtgtgtgtaatagtggtgtagggtatacagagaggtgggtagttgtagatacctgtgtgtggttgtcagcaagactgnatatntgtgaggtgtctgtgtgaatcttt

SEQ ID NO: 617 - DNA, 544 bp, Homo Sapiens
tttgagtccgttttatttaatacagttacctcatgttacagatttagaacagaaatgacttgaccaacttcacattgttgtttaacggcaggaaaagcactaaagatggatagtcctgccttcctaatttgaatgctcttattctctacaggttagggtcaagttattcagtaaaacaggctatcaggaggttaagcccaaacagtgaggaaacaaattttatgatgcttgtttgactaaatgcatgcagtttacctcaagattaagggatttaaaaaaggttagaaaacagtgtaaccctatctcctggatatatctacagacttgtatttaggaattatgccaggctgttatttctaacagagctgatgatcatagatgtggcctttaaggcaggactgggtatttggttcttaaaaatgattctgtgcctgccaatcttaggaataaataatgctttcaatgatctacattctctgtctacctaaaaagtacaaagaaaaagaatatatttaatcaaagagagatgtgtcccaggtagatg

SEQ ID NO: 618 - DNA, 305 bp, Homo Sapiens
cattctttgagcaatatttattgagtgcctactatgtgttaggtactgtgccaggcactgataagccagtggtaagggaaacacagctctaacctcacctcattctccaggttacaaaggccatgtgcccctttgaatctggcagagaaagtttcctcgttgtaagtatttgcatctacttcaagccagattcttctgcctctttctcctttccagacccctactctgtgcagtgctgaccacagctagagccaccgccccattgctcaaccagtatttatttccctaaacgacccttccttcac

SEQ ID NO: 619 - DNA, 406 bp, Homo Sapiens
tttttttaaactgcatgatttaaaatttataatatgaaaatgcataaagaacacatcaaaaaatgcattcatatgtacttttaaaaattaatatacagaggtcatacaacaaaaacatcttagaggctttattacttcatcactaacaaggtactccaaggaatgtgaaacagatcatgatttgcacaaacagtacatttttaagcttcagaagataaagcattccagacgactctgtcgaaatacatcaataaatttaaagcagctacatctaaattgtgaggataaaatacatctaccaacaggaaatcaatgtcttaagcatacaaatgcaaaccttaaaataatttaaatgtaaaatatacaactgcaaatattaatcacagtaacaaacacaaaatagaag

SEQ ID NO: 620 - DNA, 3166 bp, Homo Sapiens
aagagctccagagagaagtcgaggaagagagagacggggtcagagagagcgcgcgggcgtgcgagcagcgaaagcgacaggggcaaagtgagtgacctgcttttgggggtgaccgccggagcgcggcgtgagccctcccccttgggatcccgcagctgaccagtcgcgctgacggacagacagacagacaccgcccccagccccagttaccacctcctccccggccggcggcggacagtggacgcggcggcgagccgcgggcaggggccggagcccgcccccggaggcggggtggagggggtcggagctcgcggcgtcgcactgaaacttttcgtccaacttctgggctgttctcgcttcggaggagccgtggtccgcgcgggggaagccgagccgagcggagccgcgagaagtgctagctcgggccgggaggagccgcagccggaggagggggaggaggaagaagagaaggaagaggagagggggccgcagtggcgactcggcgctcggaagccgggctcatggacgggtgaggcggcggtgtgcgcagacagtgctccagcgcgcgcgctccccagccctggcccggcctcgggccgggaggaagagtagctcgccgaggcgccgaggagagcgggccgccccacagcccgagccggagagggacgcgagccgcgcgccccggtcgggcctccgaaaccatgaactttctgctgtcttgggtgcattggagccttgccttgctgctctacctccaccatgccaagtggtcccaggctgcacccatggcagaaggaggagggcagaatcatcacgaagtggtgaagttcatggatgtctatcagcgcagctactgccatccaatcgagaccctggtggacatcttccaggagtaccctgatgagatcgagtacatcttcaagccatcctgtgtgcccctgatgcgatgcgggggctgctccaatgacgagggcctggagtgtgtgcccactgaggagtccaacatcaccatgcagattatgcggatcaaacctcaccaaggccagcacataggagagatgagcttcctacagcacaacaaatgtgaatgcagaccaaagaaagatagagcaagacaagaaaatccctgtgggccttgctcagagcggagaaagcatttgtttgtacaagatccgcagacgtgtaaatgttcctgcaaaaacacacactcgcgttgcaaggcgaggcagcttgagttaaacgaacgtacttgcagatgtgacaagccgaggcggtgagccgggcaggaggaaggagcctccctcagggtttcgggaaccagatctctctccaggaaagactgatacagaacgatcgatacagaaaccacgctgccgccaccacaccatcaccatcgacagaacagtccttaatccagaaacctgaaatgaaggaagaggagactctgcgcagagcactttgggtccggagggcgagactccggcggaagcattcccgggcgggtgacccagcacggtccctcttggaattggattcgccattttatttttcttgctgctaaatcaccgagcccggaagattagagagttttatttctgggattcctgtagacacacccacccacatacatacatttatatatatatatattatatatatataaaaataaatatctctattttatatatataaaatatatatattctttttttaaattaacagtgctaatgttattggtgtcttcactggatgtatttgactgctgtggacttgagttgggaggggaatgttcccactcagatcctgacagggaagaggaggagatgagagactctggcatgatcttttttttgtcccacttggtggggccagggtcctctcccctgcccaagaatgtgcaaggccagggcatgggggcaaatatgacccagttttgggaacaccgacaaacccagccctggcgctgagcctctctaccccaggtcagacggacagaaagacaaatcacaggttccgggatgaggacaccggctctgaccaggagtttggggagcttcaggacattgctgtgctttggggattccctccacatgctgcacgcgcatctcgcccccaggggcactgcctggaagattcaggagcctgggcggccttcgcttactctcacctgcttctgagttgcccaggaggccactggcagatgtcccggcgaagagaagagacacattgttggaagaagcagcccatgacagcgccccttcctgggactcgccctcatcctcttcctgctccccttcctggggtgcagcctaaaaggacctatgtcctcacaccattgaaaccactagttctgtccccccaggaaacctggttgtgtgtgtgtgagtggttgaccttcctccatcccctggtccttcccttcccttcccgaggcacagagagacagggcaggatccacgtgcccattgtggaggcagagaaaagagaaagtgttttatatacggtacttatttaatatccctttttaattagaaattagaacagttaatttaattaaagagtagggttttttttcagtattcttggttaatatttaatttcaactatttatgagatgtatcttttgctctctcttgctctcttatttgtaccggtttttgtatataaaattcatgtttccaatctctctctccctgatcggtgacagtcactagcttatcttgaacagatatttaattttgctaacactcagctctgccctccccgatcccctggctccccagcacacattcctttgaaagagggtttcaatatacatctacatactatatatatattgggcaacttgtatttgtgtgtatatatatatatatatgtttatgtatatatgtgatcctgaaaaaataaacatcgctattctgttttttatatgttcaaaccaaacaagaaaaaatagagaattctacatactaaatctctctccttttttaattttaatatttgttatcatttatttattggtgctactgtttatccgtaataattgtggggaaaagatattaacatcacgtctttgtctctagtgcagtttttcgagatattccgtagtacatatttatttttaaacaacgacaaagaaatacagatatatcttaaaaaaaaaaaa

SEQ ID NO: 621 - DNA, 569 bp, Homo Sapiens
cgcaaagataatgatagacgaatactagtgtatgcagtagaggctgtgcttacttcgatttactgcttcgtgccatcatgccgatttcatcgtaaacaccaacgtgcccgcgcctccgtgccggacgggttcctctccgagctcacccagcagctggcgcaggccaccggaagcccccccagtacatcgcggtgcacgtggtcccggacagctcatggccttcggcggctccagcgagccgtgcgcgctctgcacctgcacagatcggcaagatcggggcgcgcaaaccgtcctacagcaagctgctgtgcggcctgctggccgagcgcctgcgcatcagcccggacagggtctacatcaactattacgacatgaacgcggccaatgtgggctgaacaactccaccttcgcctaagagccgcagggacccacgctgtctgcgctggctccacccgggaacccgccgcacgctgtgtttctaggcccgccaccccaaccttctggtgggggagaaataaaccggtttagagacaaaaaaacccaaaaaaaaccccccccgggtttttttc

SEQ ID NO: 622 - DNA, 307 bp, Homo Sapiens
tttttttttttttttttttttttctcaacatggaaaaactgttcaggcacaaagattaaacaagcccgcgttgcatcccttggattgtactgaatcactgggtcccccagcctccctacctacccctgcaccccagatctgccttccccatattcatggcctcctcctccaaagcagcccaaagcagcaatgatatttactattttatatcaatctcttgctatatatatatatatctatatatctatatattggcctatcctatatatacataggattttaatgctttgaatgagtgaaggagtga

SEQ ID NO: 623 - DNA, 299 bp, Homo Sapiens
ttttttttttttttttttttttttttccagaatgaaaatactggtatatttgtataatgcaaagagaaatacagatataaatcctcaaaacggaaggtacattaataaaaatgtagcattataagccaaaaatattatatagtacttgcagaatttagtctttcagtttaacattaaaatgtctaacaaagaaatattatttaaattatagttctcattattaatttaaaacaaccatcagtagaacagcacagcttaacctagcaaacattttaaggaaatgctttgtttcctagaag

SEQ ID NO: 624 - DNA, 383 bp, Homo Sapiens
  misc_feature (240)..(240): n is a, c, g, or t
  misc_feature (323)..(323): n is a, c, g, or t
  misc_feature (327)..(327): n is a, c, g, or t
  misc_feature (329)..(329): n is a, c, g, or t
agagagctggtttcagacttcagaaggacacgggcagcagacagtggtcagtcctttcttggctctgctgacactcgagcccacattccgtcacctgctcagaatcatgcaggtctccactgctgcccttgctgtcctcctctgcaccatggctctctgcaaccagttctctgcatcacttgctgctgacacgccgaccgcctgctgcttcagctacacctcccggtcagattccacagnaatttcatagtctgactactttgaggacggaggcaggccagtgcttccaaggcccgggtgttcatcttcctaaccaagtcgangcgngncaggttctgtggctggaccccagtgagggagtggggtccaggaaatatgttcag

SEQ ID NO: 625 - DNA, 6609 bp, Homo Sapiens
ttcttttaaggagtttgccgcgagcgcgtctccttcattcgcaggctgggcgcgttcgcagtcggctggcggcgaaggaaggcgctctcgggacctcgcgggcgcgcgtcttttggctcttgcccctgtccctgcggcttggggaaggcgtaacccggcggctaggcgcgggagaagtgcggaggagccatgggcgccgggagctccaccgagcagcgcagcccggagcagccgcccgaggggagctccacgccggctgagcccgagcccagcggcggcggcccctcggccgaggcggcgccagacaccaccgcggaccccgccatcgctgcctcggaccccgccaccaagctcctacagaagaatggtcagctgtccaccatcaatggcgtagctgagcaagatgagctcagcctccaggagggtgacctaaatggccagaaaggagccctgaacggtcaaggagccctaaacagccaggaggaagaagaagtcattgtcacagaggttggacagagagactctgaagatgtgagcaaaagagactccgataaagagatggctactaagtcagcggttgttcacgacatcacagatgatgggcaggaggagacacccgaaataatcgaacagattccttcttcagaaagcaatttagaagagctaacacaacccactgagtcccaggctaatgatattggatttaagaaggtgtttaagtttgttggctttaaattcactgtgaaaaaggataagacagagaagcctgacactgtccagctactcactgtgaagaaagatgaaggggagggagcagcaggggctggcgaccacaaggaccccagccttggggctggagaagcagcatccaaagaaagcgaacccaaacaatctacagagaaacccgaagagaccctgaagcgtgagcaaagccacgcagaaatttctcccccagccgaatctggccaagcagtggaggaatgcaaagaggaaggagaagagaaacaagaaaaagaacctagcaagtctgcagaatctccgactagtcccgtgaccagtgaaacaggatcaaccttcaaaaaattcttcactcaaggttgggccggctggcgcaaaaagaccagtttcaggaagccgaaggaggatgaagtggaagcttcagagaagaaaaaggaacaagagccagaaaaagtagacacagaagaagacggaaaggcagaggttgcctccgagaaactgaccgcctccgagcaagcccacccacaggagccggcagaaagtgcccacgagccccggttatcagctgaatatgagaaagttgagctgccctcagaggagcaagtcagtggctcgcagggaccttctgaagagaaacctgctccgttggcgacagaagtgtttgatgagaaaatagaagtccaccaagaagaggttgtggccgaagtccacgtcagcaccgtggaggagagaaccgaagagcagaaaacggaggtggaagaaacagcagggtctgtgccagctgaagaattggttgaaatggatgcagaacctcaggaagctgaacctgccaaggagctggtgaagctcaaagaaacgtgtgtttccggagaggaccctacacagggagctgacctcagtcctgatgagaaggtgctgtccaaaccccccgaaggcgttgtgagtgaggtggaaatgctgtcatcacaggagagaatgaaggtgcagggaagtccactaaagaagctttttaccagcactggcttaaaaaagctttctggaaagaaacagaaagggaaaagaggaggaggagacgaggaatcaggggagcacactcaggttccagccgattctccggacagccaggaggagcaaaagggcgagagctctgcctcatcccctgaggagcccgaggagatcacgtgtctggaaaagggcttagccgaggtgcagcaggatggggaagctgaagaaggagctacttccgatggagagaaaaaaagagaaggtgtcactccctgggcatcattcaaaaagatggtgacgcccaagaagcgtgttagacggccttcggaaagtgataaagaagatgagctggacaaggtcaagagcgctaccttgtcttccaccgagagcacagcctctgaaatgcaagaagaaatgaaagggagcgtggaagagccaaagccggaagaaccaaagcgcaaggtggatacctcagtatcttgggaagctttaatttgtgtgggatcatccaagaaaagagcaaggagagggtcctcttctgatgaggaagggggaccaaaagcaatgggaggagaccaccagaaagctgatgaggccggaaaagacaaagagacggggacagacgggatccttgctggttcccaagaacatgatccagggcagggaagttcctccccggagcaagctggaagccctaccgaaggggagggcgtttccacctgggagtcatttaaaaggttagtcacgccaagaaaaaaatcaaagtccaagctggaagagaaaagcgaagactccatagctgggtctggtgtagaacattccactccagacactgaacccggtaaagaagaatcctgggtctcaatcaagaagtttattcctggacgaaggaagaaaaggccagatgggaaacaagaacaagcccctgttgaagacgcagggccaacaggggccaacgaagatgactctgatgtcccggccgtggtccctctgtctgagtatgatgctgtagaaagggagaaaatggaggcacagcaagcccaaaaaagcgcagagcagcccgagcagaaggcagccactgaggtgtccaaggagctcagcgagagtcaggttcatatgatggcagcagctgtcgctgacgggacgagggcagctaccattattgaagaaaggtctccttcttggatatctgcttcagtgacagaacctcttgaacaagtagaagctgaagccgcactgttaactgaggaggtattggaaagagaagtaattgcagaagaagaaccccccacggttactgaacctctgccagagaacagagaggcccggggcgacacggtcgttagtgaggcggaattgacccccgaagctgtgacagctgcagaaactgcagggccattgggtgccgaagaaggaaccgaagcatctgctgctgaagagaccacagaaatggtgtcagcagtctcccagttaaccgactccccagacaccacagaggaggccactccggtgcaggaggtggaaggtggcgtacctgacatagaagagcaagagaggcggactcaagaggtcctccaggcagtggcagaaaaagtgaaagaggaatcccagctgcctggcaccggtgggccagaagatgtgcttcagcctgtgcagagagcagaggcagaaagaccagaagagcaggctgaagcgtcgggtctgaagaaagagacggatgtagtgttgaaagtagatgctcaggaggcaaaaactgagccttttacacaagggaaggtggtggggcagaccaccccagaaagctttgaaaaagctcctcaagtcacagagagcatagagtccagtgagcttgtaaccacttgtcaagccgaaaccttagctggggtaaaatcacaggagatggtgatggaacaggctatcccccctgactcggtggaaacccctacagacagtgagactgatggaagcacccccgtagccgactttgacgcaccaggcacaacccagaaagacgagattgtggaaatccatgaggagaatgaggtcgcatctggtacccagtcagggggcacagaagcagaggcagttcctgcacagaaagagaggcctccagcaccttccagttttgtgttccaggaagaaactaaagaacaatcaaagatggaagacactctagagcatacagataaagaggtgtcagtggaaactgtatccattctgtcaaagactgaggggactcaagaggctgaccagtatgctgatgagaaaaccaaagacgtaccatttttcgaaggacttgaggggtctatagacacaggcataacagtcagtcgggaaaaggtcactgaagttgcccttaaaggtgaagggacagaagaagctgaatgtaaaaaggatgatgctcttgaactgcagagtcacgctaagtctcctccatcccccgtggagagagagatggtagttcaagtcgaaagggagaaaacagaagcagagccaacccatgtgaatgaagagaagcttgagcacgaaacagctgttaccgtatctgaagaggtcagtaagcagctcctccagacagtgaatgtgcccatcatagatggggcaaaggaagtcagcagtttggaaggaagccctcctccctgcctaggtcaagaggaggcagtatgcaccaaaattcaagttcagagctctgaggcatcattcactctaacagcggctgcagaggaggaaaaggtcttaggagaaactgccaacattttagaaacaggtgaaacgttggagcctgcaggtgcacatttagttctggaagagaaatcctctgaaaaaaatgaagactttgccgctcatccaggggaagatgctgtgcccacagggcccgactgtcaggcaaaatcgacaccagtgatagtatctgctactaccaagaaaggcttaagttccgacctggaaggagagaaaaccacatcactgaagtggaagtcagatgaagtcgatgagcaggttgcttgccaggaggtcaaagtgagtgtagcaattgaggatttagagcctgaaaatgggattttggaacttgagaccaaaagcagtaaacttgtccaaaacatcatccagacagccgttgaccagtttgtacgtacagaagaaacagccaccgaaatgttgacgtctgagttacagacacaagctcacgtgataaaagctgacagccaggacgctggacaggaaacggagaaagaaggagaggaacctcaggcctctgcacaggatgaaacaccaattacttcagccaaagaggagtcagagtcaaccgcagtgggacaagcacattctgatatttccaaagacatgagtgaagcctcagaaaagaccatgactgttgaggtagaaggttccactgtaaatgatcagcagctggaagaggtcgtcctcccatctgaggaagagggaggtggagctggaacaaagtctgtgccagaagatgatggtcatgccttgttagcagaaagaatagagaagtcactagttgaaccgaaagaagatgaaaaaggtgatgatgttgatgaccctgaaaaccagaactcagccctggctgatactgatgcctcaggaggcttaaccaaagagtccccagatacaaatggaccaaaacaaaaagagaaggaggatgcccaggaagtagaattgcaggaaggaaaagtgcacagtgaatcagataaagcgatcacaccccaagcacaggaggagttacagaaacaagagagagaatctgcaaagtcagaacttacagaatcttaaaacatcatgcagttaaactcattgtctgtttggaagaccagaatgtgaagacaagtagtagaagaaaatgaatgctgctgctgagactgaagaccagtatttcagaactttgagaattggagagcaggcacatcaactgatctcatttctagagagcccctgacaatcctgaggcttcatcaggagctagagccatttaacatttcctctttccaagaccaacctacaattttcccttgataaccatataaattctgatttaaggtcctaaattcttaacctggaactggagttggcaatacctagttctgcttctgaaactggagtatcattctttacatatttatatgtatgttttaagtagtcctcctgtatctattgtatatttttttcttaatgtttaaggaaatgtgcaggatactacatgctttttgtatcacacagtatatgatggggcatgtgccatagtgcaggcttggggagctttaagcctcagttatataacccacgaaaaacagagcctcctagatgtaacattcctgatcaaggtacaattctttaaaattcactaatgattgaggtccatatttagtggtactctgaaattggtcactttcctattacacggagtgtgctaaaactaaaaagcattttgaaacatacagaatgttctattgtcattgggaaatttttctttctaacccagtggaggttagaaagaagttatattctggtagcaaattaactttacatcctttttcctacttgttatggttgtttggaccgataagtgtgcttaatcctgaggcaaagtagtgaatatgttttatatgttatgaagaaaagaattgttgtaagtttttgattctactcttatatgctggactgcattcacacatggcatgaaataagtcaggttctttacaaatggtattttgatagatactggattgtgtttgtgccatatttgtgccattcttttaagaacaatgttgcaacacattcatttggataagttgtgatttgacgactgatttaaataaaatatttgcttcacttaaaaaaaaaaaa

(The sequence listing continues in the following parts.)

1. A method of detecting a metastatic breast cancer or metastatic lung cancer-associated transcript in a cell, the method comprising contacting a biological sample with a polynucleotide that selectively hybridizes to a nucleic acid sequence at least 80% identical to a sequence selected from those listed in Tables 1-12.

2. The method of claim 1, wherein the metastatic cancer-associated transcript is a metastatic lung cancer-associated transcript.

3. The method of claim 1, wherein the metastatic cancer-associated transcript is a metastatic breast cancer-associated transcript.

4. The method of claim 1, wherein the biological sample comprises isolated nucleic acids.

5. The method of claim 1, wherein the polynucleotide or the biological sample is labeled.

6. The method of claim 1, wherein the polynucleotide is immobilized on a solid surface.

7. An isolated nucleic acid molecule consisting of a polynucleotide sequence selected from those listed in Tables 1-12.

8. An expression vector comprising the nucleic acid of claim 7.

9. A host cell comprising the expression vector of claim 8.

10. An isolated polypeptide which is encoded by a nucleic acid sequence selected from those listed in Tables 1-12.

11. An antibody that specifically binds a polypeptide of claim 10.

12. The antibody of claim 11, wherein the antibody is an antibody fragment.

13. The antibody of claim 11, wherein the antibody is a humanized antibody

14. A method of detecting a metastatic breast cancer or metastatic lung cancer cell in a biological sample, the method comprising contacting the biological sample with an antibody of claim 11.

15. The method of claim 14, wherein the antibody is labeled.

16. A method of detecting antibodies specific to metastatic breast cancer in a patient, the method comprising contacting a biological sample from the patient with a polypeptide encoded by a nucleic acid comprising a sequence selected from those listed in Tables 1A-5C, 11A-12C.

17. A method of detecting antibodies specific to metastatic lung cancer in a patient, the method comprising contacting a biological sample from the patient with a polypeptide encoded by a nucleic acid comprising a sequence selected from those listed in Tables 6A-12C.

18. A method for identifying a compound that modulates a metastatic breast cancer-associated polypeptide, the method comprising the steps of:
(i) contacting the compound with a metastatic breast cancer-associated polypeptide, the polypeptide encoded by a polynucleotide that selectively hybridizes to a nucleic acid sequence at least 80% identical to a sequence selected from those listed in Tables 1A-5C, 11A-12C; and
(ii) determining the functional effect of the compound upon the polypeptide.

19. The method of claim 18, wherein the functional effect is determined by measuring ligand binding to the polypeptide.

20. A method for identifying a compound that modulates a metastatic lung cancer-associated polypeptide, the method comprising the steps of:
(i) contacting the compound with a metastatic breast cancer-associated polypeptide, the polypeptide encoded by a polynucleotide that selectively hybridizes to a nucleic acid sequence at least 80% identical to a sequence selected from those listed in Tables 6A-12C; and
(ii) determining the functional effect of the compound upon the polypeptide.

21. A method of inhibiting proliferation of a metastatic breast cancer-associated cell in a patient, the method comprising the step of administering to the subject a therapeutically effective amount of a compound that modulates a polypeptide encoded by a nucleic acid sequence selected from those listed in Tables 1A-5C, 11A-12C.

22. A method of inhibiting proliferation of a metastatic lung cancer-associated cell in a patient, the method comprising the step of administering to the subject a therapeutically effective amount of a compound that modulates a polypeptide encoded by a nucleic acid sequence selected from those listed in Tables 6A-12C.

23. A drug screening assay comprising the steps of
(i) administering a test compound to a mammal having metastatic breast cancer or a cell isolated therefrom;
(ii) comparing the level of gene expression of a polynucleotide that selectively hybridizes to a sequence at least 80% identical to a sequence selected from those listed in Tables 1A-5C, 11A-12C in a treated cell or mammal, with the level of gene expression of the polynucleotide in a control cell or mammal, wherein a test compound that modulates the level of expression of the polynucleotide is a candidate for the treatment of metastatic breast cancer.

24. A pharmaceutical composition for treating a mammal having metastatic breast cancer, the composition comprising a compound identified by the assay of claim 23 and a physiologically acceptable excipient.

25. A drug screening assay comprising the steps of
(i) administering a test compound to a mammal having metastatic lung cancer or a cell isolated therefrom;
(ii) comparing the level of gene expression of a polynucleotide that selectively hybridizes to a sequence at least 80% identical to a sequence selected from those listed in Tables 6A-12C in a treated cell or mammal, with the level of gene expression of the polynucleotide in a control cell or mammal, wherein a test compound that modulates the level of expression of the polynucleotide is a candidate for the treatment of metastatic lung cancer.

26. A pharmaceutical composition for treating a mammal having metastatic lung cancer, the composition comprising a compound identified by the assay of claim 25 and a physiologically acceptable excipient.

27. A method of detecting a metastatic breast cancer-associated polypeptide in a cell, the method comprising contacting a biological sample from the patient with a antibody that that specifically binds a polypeptide encoded by a polynucleotide sequence selected from those listed in Tables 1A-5C, 11A-12C.

28. The method of claim 27, wherein the antibody is labeled.

29. A method of detecting a metastatic lung cancer-associated polypeptide in a cell from a patient, the method comprising contacting a biological sample from the patient with a antibody that that specifically binds a polypeptide encoded by a polynucleotide sequence selected from those listed in Tables 6A-12C.

30. The method of claim 29, wherein the antibody is labeled.
